(19) United States
(12) Patent Application Publication
(10) Pub. No.: US 2021/0340504 A1
(43) Pub. Date: Nov. 4, 2021

(54) Cells and Methods for the Production of Ursodeoxycholic Acid and Precursors Thereof

(71) Applicant: INTREXON CORPORATION, Blacksburg, VA (US)

(72) Inventors: Maria ENQUIST-NEWMAN, Radford, VA (US); Erin TOM, Radford, VA (US); Cleo HO, Radford, VA (US); Christopher SAVILE, Radford, VA (US); Abhinav KUMAN, Radford, VA (US); Lauren ESSER, Radford, VA (US); Andrea CHAN, Radford, VA (US); Michael CLAY, Radford, VA (US); Adrianna PIGULA, Radford, VA (US); Hsiang-yun CHEN, Radford, VA (US)

(21) Appl. No.: 17/283,112

(22) PCT Filed: Oct. 8, 2019
(86) PCT No.: PCT/US2019/055180

§ 371 Date: Apr. 6, 2021

Related U.S. Application Data
(60) Provisional application No. 62/743,122, filed on Oct. 9, 2018.

(51) Int. Cl. C12N 9/04; C12N 15/52; C12P 33/06

(52) U.S. Cl. CPC C12N 9/0006; C12Y 101/01159; C12P 33/06; C12N 15/52

(57) ABSTRACT

Genetically-modified cell capable of producing UD CA, cholic acid, and/or another UDCA precursor comprising at least one heterologous polynucleotide encoding an enzyme involved in a metabolic pathway that converts sugar to UDCA, cholic acid, and/or another UDCA precursor. Method of making UDCA, cholic acid, and/or another UDCA precursor using such a cell. Use of UDCA or UDCA precursor produced using such a method for the manufacture of a medicament for the treatment of a disease or symptom of a disease. Medicament comprising UDCA or UDCA precursor made using such a method. Method of treating a disease or symptom of a disease comprising administering UDCA or a UDCA precursor made using such a method. Isolated nucleic acid encoding at least one enzyme involved in a metabolic pathway that converts sugar to UDCA, cholic acid, and/or another UDCA precursor. Vector comprising a nucleic acid encoding at least one enzyme involved in a metabolic pathway that converts sugar to UDCA, cholic acid and/or another UDCA precursor. Method of making a genetically-modified cell capable of synthesizing UDCA, cholic acid, and/or another UDCA precursor. Composition comprising UDCA or a UDCA precursor, a free acid or CoA thereof, or a pharmaceutically-acceptable derivative or prodrug thereof.

### BACKGROUND OF THE INVENTION

[0001] The subject matter of the present invention relates to microorganisms, such as yeast and bacteria, genetically-modified so as to produce ursodeoxycholic acid (“UDCA”) or a UDCA precursor. UDCA, also known as ursodiol, is a secondary bile acid produced in bears. Secondary bile acids are formed when primary bile acids produced by the liver are secreted into the intestines and metabolized by intestinal bacteria.

[0002] UDCA helps regulate cholesterol by reducing the rate at which the intestine absorbs cholesterol molecules while breaking up micelles containing cholesterol. Thus, UDCA is used to non-surgically treat gallstones made of cholesterol. It is also used to relieve itching in pregnancy for some women who suffer obstetric cholestasis. Additionally, UDCA can be used to treat primary biliary cirrhosis (PDC).

[0003] UDCA has never been directly produced by any known microbial system. See e.g., Tonin, F., and Arends, I. W. C. E., “Latest development in the synthesis of ursodeoxycholic acid (UDCA): a critical review,” Beilstein J. Otg. Chem. 14:470-483 (2018); see also e.g., Russell, D.W., “The enzymes, regulation, and genetics of bile acid synthesis,” Annu Rev Biochem 72:134-74 (2003). It is currently synthetized from animal-derived starting material at substantial costs. There is thus a need to produce UDCA cheaper and more efficiently.

[0004] Microbes in the human gut are known to produce UDCA by metabolizing chenodeoxycholic acid (CDCA), one of two primary bile acids produced by the human liver, where it is synthesized from cholesterol. However, microbes do not produce CDCA. It is thus desirable to engineer a cell or microorganism to produce CDCA, which may be useful inofitself or as an intermediate to the production of UDCA.

[0005] UDCA may also be produced chemically from cholic acid, the other primary bile acid produced by the human liver and synthesized from cholesterol. Cholic acid itself may be used to treat patients with bile acid or preoxisomal disorders. In addition, cholic acid may serve as a starting substrate for the synthesis of various other chemicals besides UDCA, including the secondary bile acid deoxycholic acid, which has various medicinal uses, such as a fat emulsifier and as a treatment for double chin.

[0006] Cholic acid, however, is currently obtained from the slaughter of animals, and the process of isolating the compound is often difficult and/or costly. Like CDCA, cholic acid is not known to be produced by microorganisms. It is thus desirable to engineer a cell or microorganism to produce cholic acid, which may be useful inofitself or as an intermediate to the production of other useful chemicals.

### SUMMARY OF THE INVENTION

[0007] The present invention relates in part to a genetically-modified cell capable of producing UDCA or a UDCA precursor. The cell may comprise at least one heterologous enzyme involved in a metabolic pathway that converts sugar to UDCA or a UDCA precursor and/or at least one heterologous polynucleotide encoding such an enzyme.

[0008] The invention also relates to a method of making UDCA or a UDCA precursor. The method comprises contacting a substrate with the aforementioned genetically-modified cell and growing the cell to make UDCA or UDCA precursor.

[0009] The invention further relates to the use of UDCA or UDCA precursor for the manufacture of a medicament for the treatment of a disease or a symptom of a disease and to such a medicament.

[0010] The invention additionally relates to a method of treating a disease or symptom of a disease comprising administering UDCA or a UDCA precursor to a subject in need thereof.

[0011] Yet another aspect of the invention is a nucleic acid encoding at least one enzyme involved in a metabolic pathway that converts sugar to UDCA or a UDCA precursor or a vector encoding such a nucleic acid.

[0012] A further aspect of the invention is a method of making a genetically-modified cell capable of synthesizing UDCA or a UDCA precursor, the method comprising: contacting a cell with at least one heterologous polynucleotide encoding an enzyme involved in a metabolic pathway that converts sugar to UDCA or a UDCA precursor; and growing the cell so that said enzyme is expressed in said microorganism.

[0013] A yet further aspect of the invention is a composition comprising UDCA or a UDCA precursor, a free acid or CoA thereof, or a pharmaceutically-acceptable derivative or prodrug thereof.

### BRIEF DESCRIPTION OF THE DRAWINGS

[0014] The novel features of the invention are set forth with particularity in the appended claims. A better understanding of the features and advantages of the present invention will be obtained by reference to the following detailed description that sets forth illustrative embodiments, in which the principles of the invention are utilized, and the accompanying drawings of which:

[0015] FIG. 1 shows a 13-step enzymatic pathway from cholesterol to UDCA. The genes encoding this 13-step enzymatic pathway, which include CYP7A1, HSD3B7, AKR1D1, AKR1C4, CYP27A1, SLC27A5, Racemase, ACOX2, HSD17B4, Peroxisomal Thiolase 2, 7α-HSD, 7β-HSD, and choloyl-CoA hydrolase, were introduced into yeast.

[0016] FIG. 2 shows 2-step enzymatic pathway from cholesta-5,7,24-trienol, a native yeast sterol, to cholesterol. The genes encoding this 2-step enzymatic pathway include DHCR7 and DHCR24.

[0017] FIG. 3 shows the steps for preparing samples for mass spectroscopy analysis. The genetically-modified microorganisms described throughout were subject to this protocol in order to determine levels of UDCA and/or UDCA precursors made.

[0018] FIG. 4 shows two alternative methods for preparing samples for mass spectroscopy analysis. The genetically-modified microorganisms described throughout were subject to this protocol in order to determine levels of UDCA and/or UDCA precursors made.

[0019] FIG. 5 shows the amount of relative cholesterol made from yeast strains expressing various DHCR24 variants. The DHCR24 variants from Homo sapiens and Danio rerio (zebrafish) exhibited the best activities.

[0020] FIG. 6 shows the activities of CYP7A1 variants in making 7-alpha-hydroxycholesterol from cholesterol. CYP7A1 from Mus musculus exhibited the best activity.

[0021] FIG. 7 shows the activities of HSD3B7 variants in making 7α-hydroxy-4-cholesten-3-one from 7-alpha-hydroxycholesterol. HSD3B7 from Homo sapiens exhibited the best activity.

[0022] FIG. 8 shows the activities of AKR1D1 variants in making 7α-hydroxy-5β-cholestan-3-one from 7α-hydroxy-4-cholesten-3-one. AKR1D1 from Homo sapiens and Mus musculus exhibited the best activity

[0023] FIG. 9 shows the activities of AKR1C4 variants in making 5β-cholestane-3α,7α-diol from 7α-hydroxy-5β-cholestan-3-one. AKR1C4 from Macaca fuscata exhibited the best activity.

[0024] FIG. 10 shows the activities of CYP8B1 variants in making 7α,12α-dihydroxy-4-cholesten-3-one from 7α-hydroxy-4-cholesten-3-one. CYP8B1 from Mus musculus and Ogctolagus cuniculus exhibited the best activity.

[0025] FIG. 11 shows the activities of CYP27A1 variants in making (25R)-3α,7α-dihydroxy-5β-cholestanoic acid from 5β-cholestane-3α,7α-diol. In order to more easily detect CYP27A1 activity, SLC27A5 from Homo sapiens was introduced into the strains and the SLC27A5 product was measured by mass spec. Most of the variants were able to produce the SLC27A5 product.

[0026] FIGS. 12A and 12B show CoA ligase activities on (25R)-3α,7α,12α-trihydroxy-5β-cholestan-26-oic acid when expressing different variants of SLC27A5. FIG. 12A shows HPLC data indicating that there is a peak detected that is specific to ligase expressing strains. FIG. 12B shows mass spec data confirming the presence of active ligase in the expressing strains. It is also noted that CoA ligase also exhibits activity using 3α,5β,7α,12α,24E-trihydroxy-cholest-24-en-26-oic acid as the substrate.

[0027] FIGS. 13A and 13B show the activities of AMACR and ACOX2 variants in making different products. FIG. 13A shows AMACR from both Homo sapiens and Rattus norvegicus exhibit excellent racemization activity, converting (25R)-3α,7α-dihydroxy-5β-cholestanoyl-CoA into (25S)-3α,7α-dihydroxy-5β-cholestanoyl-CoA. FIG. 13B shows that ACOX2 from Homo sapiens in combination with Homo sapien AMACR has the best activity with respect to converting (25S)-3α,7α-dihydroxy-5β-cholestanoyl-CoA into (24E)-3α,7α-dihydroxy-5β-cholest-24-enoyl-CoA.

[0028] FIG. 14 shows the activities of ACOX2 variants in making (24E)-3α,7α-dihydroxy-5β-cholest-24-enoyl-CoA from (25S)-3α,7α-dihydroxy-5β-cholestanoyl-CoA. ACOX2 from Homo sapiens and Ogctolagus cuniculus exhibited the best activity.

[0029] FIG. 15 shows the activities of HSD17B4 variants in making 3α,7α(-dihydroxy-24-oxo-5β-cholestanoyl-CoA from (24E)-3α,7α-dihydroxy-5β-cholest-24-enoyl-CoA. HSD17B4 from Rattus norvegicus, Bos taurus, and Xenopus laevis exhibited the best activities.

[0030] FIG. 16 shows the activities of SCP2 variants in making 3α,7α(-dihydroxy-5β-cholan-24-oyl-CoA from 3α,7α(-dihydroxy-24-oxo-5β-cholestanoyl-CoA. SCP2 activity was detected by LCMS in all samples, including negative control. However, enhanced activity was observed in the strain overexpressing the native yeast gene POT1.

[0031] FIG. 17 shows the activities of 7α-HSD variants in making 3α-hydroxy-7-oxo-5β-cholan-24-oyl-CoA from 3α,7α-dihydroxy-5β-cholan-24-oyl-CoA. 7α-HSD from Escherichia coli and Bacteroides fragilis exhibited the best activity.

[0032] FIG. 18 shows the activities of 7β-HSD variants in making 3α,7β-dihydroxy-5β-cholan-24-oyl-CoA from 3α-hydroxy-7-oxo-5β-cholan-24-oyl-CoA. 7β-HSD from Clostridium sardiniense exhibited the best activity.

[0033] FIG. 19 shows the activities of several combinations of thiolase/SCP2, 7α-HSD, and 7β-HSD. The strains were then tested by GC/MS for the ability to produce UDCA/UDC-CoA. The following combinations exhibited the best activities: POT1 Thiolase, Escco (E. coli) 7α-HSD; and Closa (C. sardiniense) 7β-HSD and POT1 Thiolase, Bacfr (B. fragilis) 7α-HSD, and C. sardiniense 7β-HSD.

[0034] FIG. 20 shows the various enzymes involved in a pathway described herein for producing UDCA from sugar, the product of each of the enzymes, and the corresponding CoA and free acid forms of these products, where applicable. The CoA and the free acid forms are made by the microorganisms and the methods described throughout.

[0035] FIG. 21 shows a 12-step enzymatic pathway from cholesterol to cholic acid. The genes encoding this 12-step enzymatic pathway, which include CYP7A1, HSD3B7, CYP8B1, AKR1D1, AKR1C4, CYP27A1, SLC27A5, Racemase, ACOX2, HSD17B4, Peroxisomal Thiolase 2, and choloyl-CoA hydrolase, were introduced into yeast.

[0036] FIG. 22 shows the various enzymes involved in a pathway described herein for producing cholic acid from sugar, the product of each of the enzymes, and the corresponding CoA and free acid forms of these products, where applicable. The CoA and the free acid forms are made by the microorganisms and the methods described throughout.

[0037] FIG. 23 shows the activities of CYP8B1 variants in making 7α,12α-dihydroxy-4-cholesten-3-one from 7α-hydroxy-4-cholesten-3-one. CYP8B1 from Mus musculus and Ogctolagus cuniculus exhibited the best activity.

[0038] FIG. 24 depicts a flow chart showing the steps for performing liquid chromatography and mass spectrometry on a product.

[0039] FIG. 25 shows the amount of relative cholic acid detected from a yeast strain expressing CYP8B1 from Mus musculus and a yeast strain not expressing CYP8B1. The results show that CYP8B1 from Mus musculus was active and produced choloyl-CoA (cholic acid detected). No cholic acid was detected in the strain lacking the CYP8B1 enzyme.

### DETAILED DESCRIPTION OF THE INVENTION

[0040] Definitions

[0041] The term “about” in relation to a reference numerical value and its grammatical equivalents as used herein includes the numerical value itself and a range of values plus or minus 10% from that numerical value. For example, the amount “about 10” includes 10 and any amounts from 9 to 11.

[0042] The terms “genetic modification ” or “genetically-modified” and their grammatical equivalents as used herein refers to one or more alterations of a nucleic acid or to a cell that contains modifications to its genome.

[0043] The terms “operably connected”, “operably coupled”, and their grammatical equivalents are used herein interchangeably and refer to two or more units that work together to result in a certain outcome. For example, in reference to gene expression, a polynucleotide encoding a promoter can be operably connected to a polynucleotide encoding gene which, under the right conditions, can lead to the expression of the gene. With regard to a metabolic pathway, the term operably connected can refer to two or more enzymes that work in the pathway to convert a substrate into a product. The enzymes can be consecutive within the pathway. In some cases, the enzymes are not directly consecutive within the pathway.

[0044] The terms “and/or” and “any combination thereof” and their grammatical equivalents are used herein interchangeably and convey that any combination is specifically contemplated. Solely for illustrative purposes, the following phrases “A, B, and/or C” or “A, B, C, or any combination thereof” can mean “A individually; B individually; C individually; A and B; B and C; A and C; and A, B, and C.”

[0045] The term “sugar” and its grammatical equivalents as used herein include, but are not limited to, (i) simple carbohydrates, such as monosaccharides (e.g., glucose fructose, galactose, ribose); disaccharides (e.g., maltose, sucrose, lactose); oligosaccharides (e.g., raffinose, stachyose); or (ii) complex carbohydrates, such as starch (e.g., long chains of glucose, amylose, amylopectin); glycogen; fiber (e.g., cellulose, hemicellulose, pectin, gum, mucilage).

[0046] The term “alcohol” and its grammatical equivalents as used herein include, but are not limited to, any organic compound in which the hydroxyl functional group (—OH) is bound to a saturated carbon atom. For example, the term alcohol encompasses: monohydric alcohols (e.g., methanol, ethanol, isopropyl alcohol, butanol, pentanol, cetyl alcohol); polyhydric alcohols (e.g., ethylene glycol, propylene glycol, glycerol, erythritol, threitol, xylitol, mannitol, sorbitol, volemitol);

[0047] unsaturated aliphatic alcohols (e.g., allyl alcohol, geraniol, propargyl alcohol); and alicyclic alcohols (e.g., inositol, menthol).

[0048] The term “fatty acid” and its grammatical equivalents as used herein include, but are not limited to, a carboxylic acid with a long aliphatic chain that is either saturated or unsaturated. Examples of unsaturated fatty acids include, but are not limited to, myristoleic acid, sapienic acid, linoelaidic acid, α-linolenic acid, stearidonic acid, eicosapentaenoic acid, docosahexaenoic acid, linoleic acid, γ-linolenic acid, dihomo-γ-linolenic acid, arachidonic acid, docosatetraenoic acid, palmitoleic acid, vaccenic acid, paullinic acid, oleic acid, elaidic acid, gondoic acid, erucic acid, nervonic acid, and mead acid. Examples of saturated fatty acids include, but are not limited to, propionic acid, butyric acid, valeric acid, hexanoic acid, enanthic acid, caprylic acid, pelargonic acid, capric acid, undecylic acid, lauric acid, tridecylic acid, myristic acid, pentadecylic acid, palmitic acid, margaric acid, stearic acid, nonadecylic acid, arachidic acid, heneicosylic acid, behenic acid, tricosylic acid, lignoceric acid, pentacosylic acid, cerotic acid, heptacosylic acid, montanic acid, nonacosylic acid, melissic acid, henatriacontylic acid, lacceroic acid, psyllic acid, geddic acid, ceroplastic acid, hexatriacontylic acid, heptatriacontanoic acid, and octatriacontanoic acid.

[0049] The term “substantially pure” and its grammatical equivalents as used herein mean that a particular substance does not contain a majority of another substance. For example, “substantially pure UDCA” can mean that the substance comprises at least 70%, 75%, 80%, 81%, 82%, 83%, 84%, 85%, 86%, 87%, 88%, 89%, 90%, 91%, 92%, 93%, 94%, 95%, 96%, 97%, 98%, 99%, 99.1%, 99.2%, 99.3%, 99.4%, 99.5%, 99.6%, 99.7%, 99.8%, 99.9%, 99.99%, 99.999%, or 99.9999% UDCA.

[0050] The term “heterologous” and its grammatical equivalents as used herein means that a substance is derived from a different species than that of the host microorganism. For example, a “heterologous gene” means that the gene catedis from a different species than that of the host microorganism.

[0051] The term “substantially identical” and its grammatical equivalents as used herein in reference to sequences means that the sequences are at least 50% identical. In some instances, the term substantially identical refers to a sequence that is at least 55%, at least 60%, at least 65%, at least 70%, at least 75%, at least 80%, at least 85%, at least 90%, at least 95%, at least 96%, at least 97%, at least 98%, or at least 99% identical to the reference sequence. The percentage of identity between two sequences is determined by aligning the two sequences, using for example the alignment method of Needleman and Wunsch (J. Mol. Biol., 1970, 48: 443), as revised by Smith and Waterman (Adv. Appl. Math., 1981, 2: 482), so that the highest order match is obtained between the two sequences and the number of identical amino acids/nucleotides is determined between the two sequences. Methods to calculate the percentage identity between two amino acid sequences are generally art recognized and include, for example, those described by Carillo and Lipton (SIAM J. Applied Math., 1988, 48:1073) and those described in Computational Molecular Biology, Lesk, e.d. Oxford University Press, New York, 1988, Biocomputing: Informatics and Genomics Projects. Generally, computer programs will be employed for such calculations. Computer programs that may be used in this regard include, but are not limited to, GCG (Devereux et al., Nucleic Acids Res., 1984, 12: 387) BLASTP, BLASTN and FASTA (Altschul et al., J. Molec. Biol., 1990:215:403). A particularly preferred method for determining the percentage identity between two polypeptides involves the Clustal W algorithm (Thompson, J D, Higgines,

[0052] D G and Gibson T J, 1994, Nucleic Acid Res 22(22): 4673-4680 together with the BLOSUM 62 scoring matrix (Henikoff S & Henikoff, J G, 1992, Proc. Natl. Acad. Sci. USA 89: 10915-10919 using a gap opening penalty of 10 and a gap extension penalty of 0.1, so that the highest order match obtained between two sequences where at least 50% of the total length of one of the two sequences is involved in the alignment.

[0053] The terms “UDCA intermediate”, “UDCA precursor”, and their grammatical equivalents are used interchangeably and refer to any substrate that can be used to produce UDCA. This includes substrates that are far removed from UDCA itself, such as sugar, desmosterol, and cholesterol. The term also expressly encompasses 7-alpha-hydroxycholesterol; 7α-hydroxy-4-cholesten-3-one; 7α-hydroxy-5β-cholestan-3-one; 5β-cholestane-3α,7α-diol; (25R)-3α,7α-dihydroxy-5β-cholestanoic acid; (25R)-3α,7α-dihydroxy-5β-cholestanoyl-CoA; (25S)-3α,7α-dihydroxy-5β-cholestanoyl-CoA; (24E)-3α,7α-dihydroxy-5β-cholest-24-enoyl-CoA; 3α,7α-dihydroxy-24-oxo-5β-cholestanoyl-CoA; 3α,7α-dihydroxy-5β-cholan-24-oyl-CoA; 3α-hydroxy-7-oxo-5β-cholan-24-oyl-CoA; 3α,7β-dihydroxy-5β-cholan-24-oyl-CoA; 7α,12α-dihydroxy-4-cholesten-3-one; 7α,12α-dihydroxy-5β-cholestan-3-one; 5β-cholestane-3α,7α,12α-triol; (25R)-3α,7α,12α-trihydroxy-5β-cholestan-26-oic acid; (25R)-3α,7α,12α-trihydroxy-5β-cholestanoyl-CoA; (25S)-3α,7α,12α-trihydroxy-5β-cholestanoyl-CoA; (24E)-3α,7α,12α-trihydroxy-5β-cholest-24-enoyl-CoA; 3α,7α,12α-trihydroxy-24-oxo-5β-cholestanoyl-CoA; 3α,7α,12α-trihydroxy-5β-cholan-24-oyl-CoA; and cholic acid.

[0054] As will be apparent to those of skill in the art upon reading this disclosure, each of the individual embodiments described and illustrated herein has discrete components and features, which can be readily separated from or combined with the features of any of the other several cases without departing from the scope or spirit of the present invention. Any recited method can be carried out in the order of events recited or in any other order that is logically possible.

[0055] Unless defined otherwise herein, all technical and scientific terms used herein have the same meaning as commonly understood by one of ordinary skill in the art to which this invention belongs. Although any methods and materials similar or equivalent to those described herein can also be used in the practice or testing of the present invention, representative illustrative methods and materials are now described.

[0056] The publications discussed herein are provided solely for their disclosure prior to the filing date of the present application. Nothing herein is to be construed as an admission that the present invention is not entitled to antedate such publication by virtue of prior invention. Further, the dates of publication provided may be different from the actual publication dates, which may need to be independently confirmed.

[0057] Biosynthetic Pathway

[0058] The present invention relates in part to biosynthetic pathways that produce UDCA or a UDCA precursor. UDCA, also known as “ursodeoxycholic acid” or “ursodiol” is a secondary bile acid with a molecular formula C₂₄H₄₀O₄, a molar mass of 392.56 g/mol, and a CAS number of 128-13-2.

[0059] In certain embodiments, the pathway involves the conversion of 3α,7α(-dihydroxy-5β-cholanoic acid, also known as chenodeoxycholic acid or CDCA, to UDCA.

[0060] In certain embodiments, the pathway involves the conversion of the Co-A form of CDCA to UDCA. The Co-A form of CDCA is 3α,7α(-dihydroxy-5β-cholan-24-oyl-CoA, which is also known as Chenodeoxycholoyl-CoA or CDC-CoA.

[0061] In certain embodiments, the conversion of CDC-CoA to UDCA involves at least one of the following reactions: conversion of CDC-CoA to 3α-hydroxy-7-oxo-5β-cholan-24-oyl-CoA; conversion of 3α-hydroxy-7-oxo-5β-cholan-24-oyl-CoA to 3α,7β-dihydroxy-5β-cholan-24-oyl-CoA; and/or conversion of 3α,7β-dihydroxy-5β-cholan-24-oyl-CoA to UDCA.

[0062] In certain embodiments, the pathway involves the conversion of cholesterol to CDCA or CDC-CoA.

[0063] In certain embodiments, the conversion of cholesterol to CDC-CoA involves at least one of the following reactions: conversion of cholesterol to 7-alpha-hydroxycholesterol; conversion of 7-alpha-hydroxycholesterol to 7α-hydroxy-4-cholesten-3-one; conversion of 7α-hydroxy-4-cholesten-3-one to 7α-hydroxy-5β-cholestan-3-one; conversion of 7α-hydroxy-5β-cholestan-3-one to 5β-cholestane-3α,7α-diol; conversion of 5β-cholestane-3α,7α-diol to (25R)-3α,7α-dihydroxy-5β-cholestanoic acid; conversion of (25R)-3α,7α-dihydroxy-5β-cholestanoic acid to (25R)-3α,7α-dihydroxy-5β-cholestanoyl-CoA; conversion of (25R)-3α,7α-dihydroxy-5β-cholestanoyl-CoA to (25S)-3α,7α-dihydroxy-5β-cholestanoyl-CoA; conversion of (25S)-3α,7α-dihydroxy-5β-cholestanoyl-CoA to (24E)-3α,7α-dihydroxy-5β-cholest-24-enoyl-CoA; conversion of (24E)-3α,7α-dihydroxy-5β-cholest-24-enoyl-CoA to 3α,7α(-dihydroxy-24-oxo-5β-cholestanoyl-CoA; and/or conversion of 3α,7α(-dihydroxy-24-oxo-5β-cholestanoyl-CoA to CDC-CoA.

[0064] In certain embodiments, the pathway involves the conversion of cholesterol to cholic acid. Cholic acid can be chemically converted to UDCA.

[0065] In certain embodiments, the conversion of cholesterol to cholic acid may involve at least one of the following reactions: conversion of cholesterol to 7-alpha-hydroxycholesterol; the conversion of 7-alpha-hydroxycholesterol to 7α-hydroxy-4-cholesten-3-one; conversion of 7α-hydroxy-4-cholesten-3-one to 7α,12α-dihydroxy-4-cholesten-3-one; conversion of 7α,12α-dihydroxy-4-cholesten-3-one to 7α,12α-dihydroxy-5β-cholestan-3-one; conversion of 7α,12α-dihydroxy-5β-cholestan-3-one to 5β-cholestane-3α,7α,12α-triol; conversion of 5β-cholestane-3α,7α,12α-triol to (25R)-3α,7α,12α-trihydroxy-5β-cholestan-26-oic acid; conversion of (25R)-3α,7α,12α-trihydroxy-5β-cholestan-26-oic acid to (25R)-3α,7α,12α-trihydroxy-5β-cholestanoyl-CoA; conversion of (25R)-3α,7α,12α-trihydroxy-5β-cholestanoyl-CoA to (25S)-3α,7α,12α-trihydroxy-5β-cholestanoyl-CoA; conversion of (25S)-3α,7α,12α-trihydroxy-5β-cholestanoyl-CoA to (24E)-3α,7α,12α-trihydroxy-5β-cholest-24-enoyl-CoA; conversion of (24E)-3α,7α,12α-trihydroxy-5β-cholest-24-enoyl-CoA to 3α,7α,12α-trihydroxy-24-oxo-5β-cholestanoyl-CoA; conversion of 3α,7α,12α-trihydroxy-24-oxo-5β-cholestanoyl-CoA to 3α,7α,12α-trihydroxy-5β-cholan-24-oyl-CoA; and conversion of 3α,7α,12α-trihydroxy-5β-cholan-24-oyl-CoA to cholic acid.

[0066] In certain embodiments, the pathway involves the conversion of cholesta-5,7,24-trienol to cholesterol. The conversion of cholesta-5,7,24-trienol to cholesterol may involve the conversion of cholesta-5,7,24-trienol to desmosterol and/or the conversion of desmosterol to cholesterol. Cholesta-5,7,24-trienol is produced naturally from sugar by yeast.

[0067] Enzymes

[0068] Each of the aforementioned reactions and/or conversions may be catalyzed by an enzyme. For example:

[0069] 7-dehydrocholesterol reductase (gene name: DHCR7) catalyzes the conversion of cholesta-5,7,24-trienol to desmosterol. DHCR7 can comprise an amino acid sequence of any one of SEQ ID NOs: 1, 3, 5, 7, 9, or 11, or an amino acid sequence substantially identical to any of the aforementioned sequences. DHCR7 can be encoded by a polynucleotide comprising a nucleic acid sequence of any one of SEQ ID NOs: 2, 4, 6, 8, 10, or 12, or a nucleic acid sequence substantially identical to any of the aforementioned sequences.

[0070] 24-dehydrocholesterol reductase (gene name: DHCR24) catalyzes the conversion of desmosterol to cholesterol. DHCR24 can comprise an amino acid sequence of any one of SEQ ID NOs: 13, 17, 21, 25, 29, 33, 37, 41, 43, 45, or 47, or an amino acid sequence substantially identical to any of the aforementioned sequences. DHCR24 can be encoded by a polynucleotide comprising a nucleic acid sequence of any one of SEQ ID NOs: 14, 15, 16, 18, 19, 20, 22, 23, 24, 26, 27, 28, 30, 31, 32, 34, 35, 36, 38, 39, 40, 42, 44, 46, or 48, or a nucleic acid sequence substantially identical to any of the aforementioned sequences.

[0071] Cytochrome p450 family 7 subfamily A member 1 (abbreviation and gene name: CYP7A1) catalyzes the conversion of cholesterol to 7-alpha-hydroxycholesterol. CYP7A1 can comprise an amino acid sequence of any one of SEQ ID NOs: 49, 51, 53, 55, 57, 59, 61, 63, 65, 67, 69, 71, 73, 75, 77, or 79, or an amino acid sequence substantially identical to any of the aforementioned sequences. CYP7A1 can be encoded by a polynucleotide comprising a nucleic acid sequence of any one of SEQ ID NOs: 50, 52, 54, 56, 58, 60, 62, 64, 66, 68, 70, 72, 74, 76, 78, or 80, or a nucleic acid sequence substantially identical to any of the aforementioned sequences.

[0072] 3 beta-hydroxysteroid dehydrogenase type 7 (abbreviation and gene name: HSD3B7) catalyzes the conversion of 7-alpha-hydroxycholesterol to 7α-hydroxy-4-cholesten-3-one. HSD3B7 can comprise an amino acid sequence of any one of SEQ ID NOs: 81, 83, 85, or 87, or an amino acid sequence substantially identical to any of the aforementioned sequences. HSD3B7 can be encoded by a polynucleotide comprising a nucleic acid sequence of any one of SEQ ID NOs: 82, 84, 86, or 88, or a nucleic acid sequence substantially identical to any of the aforementioned sequences.

[0073] Cytochrome p450 family 8 subfamily B member 1 (abbreviation and gene name: CYP8B1) catalyzes the conversion of 7α-hydroxy-4-cholesten-3-one to 7α,12α-dihydroxy-4-cholesten-3-one. CYP8B1 can comprise an amino acid sequence of any one of SEQ ID NOs: 265, 267, 269, 271, 273, 275, or 277, or an amino acid sequence substantially identical to any of the aforementioned sequences. CYP8B1 can be encoded by a polynucleotide comprising a nucleic acid sequence of any one of SEQ ID NOs: 266, 268, 270, 272, 274, 276, or 278, or a nucleic acid sequence substantially identical to any of the aforementioned sequences.

[0074] 3-oxo-5-beta(β)-steroid 4-dehydrogenase also known as aldo-keto reductase family 1 member D1 (abbreviation and gene name: AKR1D1) catalyzes the conversion of 7α-hydroxy-4-cholesten-3-one to 7α-hydroxy-5β-cholestan-3-one. AKR1D1 also catalyzes the conversion of 7α,12α-dihydroxy-4-cholesten-3-one to 7α,12α-dihydroxy-5β-cholestan-3-one. AKR1D1 can comprise an amino acid sequence of any one of SEQ ID NOs: 89, 91, 93, or 95, or an amino acid sequence substantially identical to any of the aforementioned sequences. AKR1D1 can be encoded by a polynucleotide comprising a nucleic acid sequence of any one of SEQ ID NOs: 90, 92, 94, or 96, or a nucleic acid sequence substantially identical to any of the aforementioned sequences.

[0075] Aldo-keto reductase family 1 member C4 (abbreviation and gene name: AKR1C4) catalyzes the conversion of 7α-hydroxy-5β-cholestan-3-one to 5β-cholestane-3α,7α-diol. AKR1C4 also catalyzes the conversion of 7α,12α-dihydroxy-5β-cholestan-3-one to 5β-cholestane-3α,7α,12α-triol, AKR1C4 can comprise an amino acid sequence of any one of SEQ ID NOs: 99, 101, 103, 105, 107, 109, 111, 113, 115, 117, 119, or 121, or an amino acid sequence substantially identical to any of the aforementioned sequences. AKR1C4 can be encoded by a polynucleotide comprising a nucleic acid sequence of any one of SEQ ID NOs: 100, 102, 104, 106, 108, 110, 112, 114, 116, 118, 120, or 122, or a nucleic acid sequence substantially identical to any of the aforementioned sequences.

[0076] Cytochrome p450 family 27 subfamily A member 1 (abbreviation and gene name: CYP27A1), also known as sterol 27-hydroxylase, catalyzes the conversion of 5β-cholestane-3α,7α-diol to (25R)-3α,7α-dihydroxy-5β-cholestanoic acid. CYP27A1 also catalyzes the conversion of 5β-cholestane-3α7α,12α-triol to (25R)-3α,7α,12α-trihydroxy-5β-cholestan-26-oic acid. CYP27A1 can comprise an amino acid sequence of any one of SEQ ID NOs: 123, 125, 127, 129, 131, 133, 135, or 137, or an amino acid sequence substantially identical to any of the aforementioned sequences. CYP27A1 can be encoded by a polynucleotide comprising a nucleic acid sequence of any one of SEQ ID NOs: 124, 126, 128, 130, 132, 134, 136, or 138, or a nucleic acid sequence substantially identical to any of the aforementioned sequences.

[0077] Solute carrier family 27 member 5 (abbreviation and gene name: SLC27A5) or its yeast homologue FAT1, catalyzes the conversion of (25R)-3α,7α-dihydroxy-5β-cholestanoic acid to (25R)-3α,7α-dihydroxy-5β-cholestanoyl-CoA. SLC27A5 and FAT1 also catalyze the conversion of (25R)-3α,7α,12α-trihydroxy-5β-cholestan-26-oic acid to (25R)-3α,7α,12α-trihydroxy-5β-cholestanoyl-CoA. SLC27A5 can comprise an amino acid sequence of SEQ ID NOs: 139 or 141, or an amino acid sequence substantially identical to any of the aforementioned sequences. SLC27A5 can be encoded by a polynucleotide comprising a nucleic acid sequence of SEQ ID NOs: 140 or 142, or a nucleic acid sequence substantially identical to either of the aforementioned sequences. FAT1 can comprise an amino acid sequence of SEQ ID NO: 143, or an amino acid sequence substantially identical therewith. FAT1 can be encoded by a polynucleotide comprising a nucleic acid sequence of SEQ ID NO: 144, or a nucleic acid sequence substantially identical therewith.

[0078] Alpha-methylacyl-CoA racemase (abbreviation and gene name: AMACR) catalyzes the conversion of (25R)-3α,7α-dihydroxy-5β-cholestanoyl-CoA to (25S)-3α,7α-dihydroxy-5β-cholestanoyl-CoA. AMACR also catalyzes the conversion of (25R)-3α,7α,12α-trihydroxy-5β-cholestanoyl-CoA to (255)-3α,7α,12α-trihydroxy-5β-cholestanoyl-CoA. AMACR can comprise an amino acid sequence of any one of SEQ ID NOs: 145, 147, 149, 151, 153, 155, or 157, or an amino acid sequence substantially identical to any of the aforementioned sequences. AMACR can be encoded by a polynucleotide comprising a nucleic acid sequence of any one of SEQ ID NOs: 146, 148, 150, 152, 154, 156, or 158, or a nucleic acid sequence substantially identical to any of the aforementioned sequences.

[0079] Acyl-CoA oxidase 2 (abbreviation and gene name: ACOX2) or its yeast homologue PDX1 catalyze the conversion of (25S)-3α,7α-dihydroxy-5β-cholestanoyl-CoA to (24E)-3α,7α-dihydroxy-5β-cholest-24-enoyl-CoA. ACOX2 and PDX1 also catalyze the conversion of (255)-3α,7α,12α-trihydroxy-5β-cholestanoyl-CoA to (24E)-3α,7α,12α-trihydroxy-5β-cholest-24-enoyl-CoA. ACOX2 can comprise an amino acid sequence of any one of SEQ ID NOs: 159, 161, 163, 165, 167, 169, 171, or 173, or an amino acid sequence substantially identical to any of the aforementioned sequences. ACOX2 can be encoded by a polynucleotide comprising a nucleic acid sequence of any one of SEQ ID NOs: 160, 162, 164, 166, 168, 170, 172, or 174, or a nucleic acid sequence substantially identical to any of the aforementioned sequences. PDX1 can comprise an amino acid sequence of SEQ ID NO: 175, or an amino acid sequence substantially identical therewith. PDX1 can be encoded by a polynucleotide comprising a nucleic acid sequence of SEQ ID NO: 176, or a nucleic acid sequence substantially identical therewith.

[0080] Hydroxysteroid 17-beta dehydrogenase 4 (abbreviation and gene name: HSD17B4) or its yeast homologue FOX2 catalyze the conversion of (24E)-3α,7α-dihydroxy-5β-cholest-24-enoyl-CoA to 3α,7α-dihydroxy-24-oxo-5β-cholestanoyl-CoA. HSD17B4 and FOX 2 also catalyze the conversion of (24E)-3α,7α,12α-trihydroxy-5β-cholest-24-enoyl-CoA to 3α,7α,12α-trihydroxy-24-oxo-5β-cholestanoyl-CoA. HSD17B4 and FOX2 can comprise an amino acid sequence of any one of SEQ ID NOs: 177, 179, 181, 183, 185, 187, 189, or 191, or an amino acid sequence substantially identical to any of the aforementioned sequences. HSD17B4 can be encoded by a polynucleotide comprising a nucleic acid sequence of any one of SEQ ID NOs: 178, 180, 182, 184, 186, 188, 190, or 192, or a nucleic acid sequence substantially identical to any of the aforementioned sequences. FOX2 can comprise an amino acid sequence of SEQ ID NO: 193, or an amino acid sequence substantially identical therewith. FOX2 can be encoded by a polynucleotide comprising a nucleic acid sequence of SEQ ID NO: 194, or a nucleic acid sequence substantially identical therewith.

[0081] Sterol carrier protein 2 (abbreviation and gene name: SCP2) or its yeast homologues POT1 or ERG10 catalyze the conversion of 3α,7α-dihydroxy-24-oxo-5β-cholestanoyl-CoA to CDC-CoA. SCP2, POT1, and ERG10 also catalyze the conversion of 3α,7α,12α-trihydroxy-24-oxo-5β-cholestanoyl-CoA to 3α,7α,12α-trihydroxy-5β-cholan-24-oyl-CoA. SCP2 can comprise an amino acid sequence of any one of SEQ ID NOs: 195, 197, 199, or 201, or an amino acid sequence substantially identical to any of the aforementioned sequences. SCP2 can be encoded by a polynucleotide comprising a nucleic acid sequence of any one of SEQ ID NOs: 196, 198, 200, or 202, or a nucleic acid sequence substantially identical to any of the aforementioned sequences. POT1 can comprise an amino acid sequence of SEQ ID NO: 203, or an amino acid sequence substantially identical therewith. POT1 can be encoded by a polynucleotide comprising a nucleic acid sequence of SEQ ID NO: 204, or a polynucleotide having a nucleotide sequence substantially identical therewith. ERG10 can comprise an amino acid sequence of SEQ ID NO: 205, or an amino acid sequence substantially identical therewith. ERG10 can be encoded by a polynucleotide comprising a nucleic acid sequence of SEQ ID NO: 206, or a nucleic acid sequence substantially identical therewith.

[0082] 7alpha-hydroxysteroid dehydrogenase (abbreviation and gene name: 7α-HSD) catalyzes the conversion of CDC-CoA to 3α-hydroxy-7-oxo-5β-cholan-24-oyl-CoA. 7α-HSD can comprise an amino acid sequence of any one of SEQ ID NOs: 207, 209, 211, or 213, or an amino acid sequence substantially identical to any of the aforementioned sequences. 7α-HSD can be encoded by a polynucleotide comprising a nucleic acid sequence of any one of SEQ ID NOs: 208, 210, 212, or 214, or a nucleic acid sequence substantially identical to any of the aforementioned sequences.

[0083] 7beta-hydroxysteroid dehydrogenase (abbreviation and gene name: 7β-HSD) catalyzes the conversion of 3α-hydroxy-7-oxo-5β-cholan-24-oyl-CoA to 3α,7β-dihydroxy-5β-cholan-24-oyl-CoA. 7β-HSD can comprise an amino acid sequence of any one of SEQ ID NOs: 215, 217, 219, or 221, or an amino acid sequence substantially identical to any of the aforementioned sequences. 7β-HSD can be encoded by a polynucleotide comprising a nucleic acid sequence of any one of SEQ ID NOs: 216, 218, 220, or 222, or a nucleic acid sequence substantially identical to any of the aforementioned sequences.

[0084] Choloyl-CoA hydrolase catalyzes the conversion of 3α,7β-dihydroxy-5β-cholan-24-oyl-CoA to UDCA. Choloyl-CoA hydrolase also catalyzes the conversion of 3α,7α, 12α-trihydroxy-5β-cholan-24-oyl-CoA to cholic acid. Choloyl-CoA hydrolase can comprise an amino acid sequence of any one of SEQ ID NOs: 223, 225, 227, or 229, or an amino acid sequence substantially identical to any of the aforementioned sequences. Choloyl-CoA hydrolase can be encoded by a polynucleotide comprising a nucleic acid sequence of any one of SEQ ID NOs: 224, 226, 228, or 230, or a nucleic acid sequence substantially identical to any of the aforementioned sequences. In some cases, the choloyl-CoA hydrolase has an EC number of 3.12.27.

[0085] Aldo-Keto Reductase Family 1 Member C9 (abbreviation and gene name: AKR1C9) can comprise an amino acid of SEQ ID NO: 97, or an amino acid sequence substantially identical thereto. AKR1C9 can be encoded by a polynucleotide comprising a nucleic acid sequence of SEQ ID NO: 98, or a nucleic acid sequence substantially identical therewith.

[0086] Bile acid-CoA:amino acid N-acyltransferase (abbreviation: N-acyltransferase) catalyzes the conversion of 3α,7β-dihydroxy-5β-cholan-24-oyl-CoA to glyco-ursodeoxycholic acid (glycol-UDCA). N-acyltransferase can comprise an amino acid sequence of any one of SEQ ID NOs: 232, 234, 236, or 238, or an amino acid sequence substantially identical to any of the aforementioned sequences. Choloyl-CoA hydrolase can be encoded by a polynucleotide comprising a nucleic acid sequence of any one of SEQ ID NOs: 224, 226, 228, or 232, 234, 236, or 238, or a nucleic acid sequence substantially identical to any of the aforementioned sequences.

[0087] The present invention also contemplates the use of fragments of any of the aforementioned enzymes. In certain embodiments, the fragment is one that retains the desired biological activity of the respective full-length enzyme. Such fragments will be referred to herein as “biologically-active” fragments.

[0088] A biologically-active fragment of DHCR7 for use in the present invention may be one that retains the ability to catalyze the conversion of cholesta-5,7,24-trienol to desmosterol. A biologically-active fragment of DHCR24 for use in the present invention may be one that retains the ability to catalyze the conversion of desmosterol to cholesterol. A biologically-active fragment of CYP7A1 for use in the present invention may be one that retains the ability to catalyze the conversion of cholesterol to 7-alpha-hydroxycholesterol. A biologically-active fragment of HSD3B7 for use in the present invention may be one that retains the ability to catalyze the conversion of 7-alpha-hydroxycholesterol to 7α-hydroxy-4-cholesten-3-one. A biologically-active fragment of CYP8B1 for use in the present invention may be one that retains the ability to catalyze the conversion of 7α-hydroxy-4-cholesten-3-one to 7α,12α-dihydroxy-4-cholesten-3-one. A biologically-active fragment of AKR1D1 for use in the present invention may be one that retains the ability to catalyze the conversion of 7α-hydroxy-4-cholesten-3-one to 7α-hydroxy-5β-cholestan-3-one and/or the conversion of 7α,12α-dihydroxy-4-cholesten-3-one to 7α,12α-dihydroxy-5β-cholestan-3-one. A biologically-active fragment of AKR1C4 for use in the present invention may be one that retains the ability to catalyze the conversion of 7α-hydroxy-5β-cholestan-3-one to 5β-cholestane-3α,7α-diol and/or or the conversion of 7α,12α-dihydroxy-5β-cholestan-3-one to 5β-cholestane-3α,7α,12α-triol. A biologically-active fragment of CYP27A1 for use in the present invention may be one that retains the ability to catalyze the conversion of 5β-cholestane-3α,7α-diol to (25R)-3α,7α-dihydroxy-5β-cholestanoic acid and/or the conversion of 5β-cholestane-3α7α,12α-triol to (25R)-3α,7α,12α-trihydroxy-5β-cholestan-26-oic acid. A biologically-active fragment of SLC27A5 or FAT 1 for use in the present invention may be one that retains the ability to catalyze the conversion of (25R)-3α,7α-dihydroxy-5β-cholestanoic acid to (25R)-3α,7α-dihydroxy-5β-cholestanoyl-CoA and/or the conversion of (25R)-3α,7α,12α-trihydroxy-5β-cholestan-26-oic acid to (25R)-3α,7α,12α-trihydroxy-5β-cholestanoyl-CoA. A biologically-active fragment of AMACR for use in the present invention may be one that retains the ability to catalyze the conversion of (25R)-3α,7α-dihydroxy-5β-cholestanoyl-CoA to (25S)-3α,7α-dihydroxy-5β-cholestanoyl-CoA and/or the conversion of (25R)-3α,7α,12α-trihydroxy-5β-cholestanoyl-CoA to (255)-3α,7α,12α-trihydroxy-5β-cholestanoyl-CoA. A biologically-active fragment of ACOX2 or POX1 for use in the present invention may be one that retains the ability to catalyze the conversion of (25S)-3α,7α-dihydroxy-5β-cholestanoyl-CoA to (24E)-3α,7α-dihydroxy-5β-cholest-24-enoyl-CoA and/or the conversion of (25S)-3α,7α,12α-trihydroxy-5β-cholestanoyl-CoA to (24E)-3α,7α,12α-trihydroxy-5β-cholest-24-enoyl-CoA. A biologically-active fragment of HSD17B4 or FOX2 for use in the present invention may be one that retains the ability to catalyze the conversion of (24E)-3α,7α-dihydroxy-5β-cholest-24-enoyl-CoA to 3α,7α-dihydroxy-24-oxo-5β-cholestanoyl-CoA and/or the conversion of (24E)-3α,7α,12α-trihydroxy-5β-cholest-24-enoyl-CoA to 3α,7α,12α-trihydroxy-24-oxo-5β-cholestanoyl-CoA. A biologically-active fragment of SCP2, POT1, or ERG10 for use in the present invention may be one that retains the ability to catalyze the conversion of 3α,7α-dihydroxy-24-oxo-5β-cholestanoyl-CoA to CDC-CoA and/or the conversion of 3α,7α,12α-trihydroxy-24-oxo-5β-cholestanoyl-CoA to 3α,7α,12α-trihydroxy-5β-cholan-24-oyl-CoA. A biologically-active fragment of 7α-HSD for use in the present invention may be one that retains the ability to catalyze the conversion of CDC-CoA to 3α-hydroxy-7-oxo-5β-cholan-24-oyl-CoA. A biologically-active fragment of 7β-HSD for use in the present invention may be one that retains the ability to catalyze the conversion of 3α-hydroxy-7-oxo-5β-cholan-24-oyl-CoA to 3α,7β-dihydroxy-5β-cholan-24-oyl-CoA. A biologically-active fragment of choloyl-CoA hydrolase for use in the present invention may be one that retains the ability to catalyze the conversion of 3α,7β-dihydroxy-5β-cholan-24-oyl-CoA to UDCA and/or 3α,7α,12α-trihydroxy-5β-cholan-24-oyl-CoA to cholic acid. A biologically-active fragment of N-acyltransferase for use in the present invention may be one that retains the ability to catalyze the conversion of 3α,7β-dihydroxy-5β-cholan-24-oyl-CoA to glycol-UDCA.

[0089] Genetically-Modified Cell

[0090] The present invention relates in part to a genetically-modified cell capable of producing UDCA, cholic acid and/or another UDCA precursor. The genetically-modified cell can be used to ferment UDCA, cholic acid and/or UDCA precursor in a fermentation tank.

[0091] In certain embodiments, the cell comprises at least one heterologous enzyme, or biologically-active fragment thereof, involved in a biosynthetic pathway that produces UDCA, cholic acid, and/or another UDCA precursor, for example a pathway as described previously. In certain embodiments, the cell comprises two or more, three or more, four or more, five or more, six or more, seven or more, eight or more, nine or more, ten or more, eleven or more, twelve or more, thirteen or more, fourteen or more, fifteen or more, or sixteen or more such enzymes and/or biologically-active fragments thereof. In certain such embodiments, the enzymes or biologically-active fragments thereof are operably connected along a biosynthetic pathway. The heterologous enzyme may, for example, be DHCR7, DHCR24, CYP7A1, HSD3B7, CYP8B1, AKR1D1, AKR1C4, CYP27A1, SLC27A5, AMACR, ACOX2, HSD17B4, SCP2, 7α-HSD, 7β-HSD, choloyl-CoA hydrolase, AKR1C9, or N-acyltransferase. The cell may comprise an enzyme having an amino acid sequence as described previously for the respective enzyme.

[0092] In an embodiment wherein the cell comprises a heterologous DHCR7, the enzyme may comprise an amino acid sequence of any one of SEQ ID NOs: 1, 3, 5, 7, 9, or 11, or an amino acid sequence substantially identical to any of the aforementioned sequences.

[0093] In an embodiment wherein the cell comprises a heterologous DHCR24, the enzyme may comprise an amino acid sequence of any one of SEQ ID NOs: 13, 17, 21, 25, 29, 33, 37, 41, 43, 45, or 47, or an amino acid sequence substantially identical to any of the aforementioned sequences.

[0094] In an embodiment wherein the cell comprises a heterologous CYP7A1, the enzyme may comprise an amino acid sequence of any one of SEQ ID NOs: 49, 51, 53, 55, 57, 59, 61, 63, 65, 67, 69, 71, 73, 75, 77, or 79, or an amino acid sequence substantially identical to any of the aforementioned sequences.

[0095] In an embodiment wherein the cell comprises a heterologous HSD3B7, the enzyme may comprise an amino acid sequence of any one of SEQ ID NOs: 81, 83, 85, or 87, or an amino acid sequence substantially identical to any of the aforementioned sequences.

[0096] In an embodiment wherein the cell comprises a heterologous AKR1D1, the enzyme may comprise an amino acid sequence of any one of SEQ ID NOs: 89, 91, 93, or 95, or an amino acid sequence substantially identical to any of the aforementioned sequences.

[0097] In an embodiment wherein the cell comprises a heterologous CYP8B1, the enzyme may comprise an amino acid sequence of any one of SEQ ID NOs: 265, 267, 269, 271, 273, 275, or 277, or an amino acid sequence substantially identical to any of the aforementioned sequences.

[0098] In an embodiment wherein the cell comprises a heterologous AKR1C4, the enzyme may comprise an amino acid sequence of any one of SEQ ID NOs: 99, 101, 103, 105, 107, 109, 111, 113, 115, 117, 119, or 121, or an amino acid sequence substantially identical to any of the aforementioned sequences.

[0099] In an embodiment wherein the cell comprises a heterologous CYP27A1, the enzyme may comprise an amino acid sequence of any one of SEQ ID NOs: 123, 125, 127, 129, 131, 133, 135, or 137, or an amino acid sequence substantially identical to any of the aforementioned sequences.

[0100] In an embodiment wherein the cell comprises a heterologous SLC27A5, the enzyme may comprise an amino acid sequence of SEQ ID NOs: 139 or 141, or an amino acid sequence substantially identical to any of the aforementioned sequences.

[0101] In an embodiment wherein the cell comprises a heterologous FAT1, the enzyme may comprise an amino acid sequence of SEQ ID NO: 143, or an amino acid sequence substantially identical therewith.

[0102] In an embodiment wherein the cell comprises a heterologous AMACR, the enzyme may comprise an amino acid sequence of any one of SEQ ID NOs: 145, 147, 149, 151, 153, 155, or 157, or an amino acid sequence substantially identical to any of the aforementioned sequences.

[0103] In an embodiment wherein the cell comprises a heterologous ACOX2, the enzyme may comprise an amino acid sequence of any one of SEQ ID NOs: 159, 161, 163, 165, 167, 169, 171, or 173, or an amino acid sequence substantially identical to any of the aforementioned sequences.

[0104] In an embodiment wherein the cell comprises a heterologous FOX1, the enzyme may comprise an amino acid sequence of SEQ ID NO: 175, or an amino acid sequence substantially identical therewith.

[0105] In an embodiment wherein the cell comprises a heterologous HSD17B4, the enzyme may comprise an amino acid sequence of any one of SEQ ID NOs: 177, 179, 181, 183, 185, 187, 189, or 191, or an amino acid sequence substantially identical to any of the aforementioned sequences.

[0106] In an embodiment wherein the cell comprises a heterologous FOX2, the enzyme may comprise an amino acid sequence of SEQ ID NO: 193, or an amino acid sequence substantially identical therewith.

[0107] In an embodiment wherein the cell comprises a heterologous SCP2, the enzyme may comprise an amino acid sequence of any one of SEQ ID NOs: 195, 197, 199, or 201, or an amino acid sequence substantially identical to any of the aforementioned sequences.

[0108] In an embodiment wherein the cell comprises a heterologous POT1, the enzyme may comprise an amino acid sequence of SEQ ID NO: 203, or an amino acid sequence substantially identical therewith.

[0109] In an embodiment wherein the cell comprises a heterologous ERG10, the enzyme may comprise an amino acid sequence SEQ ID NO: 205, or an amino acid sequence substantially identical therewith.

[0110] In an embodiment wherein the cell comprises a heterologous 7α-HSD, the enzyme may comprise an amino acid sequence of any one of SEQ ID NOs: 207, 209, 211, or 213, or an amino acid sequence substantially identical to any of the aforementioned sequences.

[0111] In an embodiment wherein the cell comprises a heterologous 7β-HSD, the enzyme may comprise an amino acid sequence of any one of SEQ ID NOs: 215, 217, 219, or 221, or an amino acid sequence substantially identical to any of the aforementioned sequences.

[0112] In an embodiment wherein the cell comprises a heterologous choloyl-CoA hydrolase, the enzyme may comprise an amino acid sequence of any one of SEQ ID NOs: 223, 225, 227, or 229, or an amino acid sequence substantially identical to any of the aforementioned sequences.

[0113] In an embodiment wherein the cell comprises a heterologous AKR1C9, the enzyme may comprise an amino acid sequence of SEQ ID NO: 97, or an amino acid sequence substantially identical to any of the aforementioned sequences.

[0114] In an embodiment wherein the cell comprises a heterologous N-acyltransferase, the enzyme may comprise an amino acid sequence of any one of SEQ ID NOs: 232, 234, 236, or 238, or an amino acid sequence substantially identical to any of the aforementioned sequences.

[0115] In certain embodiments, the cell comprises at least one heterologous polynucleotide encoding an enzyme, or biologically-active fragment thereof, involved in a biosynthetic pathway that produces UDCA, cholic acid, and/or another UDCA precursor, for example a pathway as described previously. In certain embodiments, the cell comprises two or more, three or more, four or more, five or more, six or more, seven or more, eight or more, nine or more, ten or more, eleven or more, twelve or more, thirteen or more, fourteen or more, fifteen or more, or sixteen or more such polynucleotides. The heterologous polynucleotide may, for example, encode DHCR7, DHCR24, CYP7A1, HSD3B7, CYP8B1, AKR1D1, AKR1C4, CYP27A1, SLC27A5, AMACR, ACOX2, HSD17B4, SCP2, 7α-HSD, 7β-HSD, and/or choloyl-CoA hydrolase, and/or a biologically-active fragment of such an enzyme. In certain such embodiments, the enzymes and/or biologically-active fragments thereof are operably connected along a biosynthetic pathway.

[0116] In an embodiment wherein the cell comprises a heterologous polynucleotide encoding DHCR7, the polynucleotide may comprise a nucleic acid sequence of any one of SEQ ID NOs: 2, 4, 6, 8, 10, or 12, or a nucleic acid sequence substantially identical to any of the aforementioned sequences.

[0117] In an embodiment wherein the cell comprises a heterologous polynucleotide encoding DHCR24, the polynucleotide may comprise a nucleic acid sequence of any one of SEQ ID NOs: 14, 15, 16, 18, 19, 20, 22, 23, 24, 26, 27, 28, 30, 31, 32, 34, 35, 36, 38, 39, 40, 42, 44, 46, or 48, or a nucleic acid sequence substantially identical to any of the aforementioned sequences.

[0118] In an embodiment wherein the cell comprises a heterologous polynucleotide encoding CYP7A1, the polynucleotide may comprise a nucleic acid sequence of any one of SEQ ID NOs: 50, 52, 54, 56, 58, 60, 62, 64, 66, 68, 70, 72, 74, 76, 78, or 80, or a nucleic acid sequence substantially identical to any of the aforementioned sequences.

[0119] In an embodiment wherein the cell comprises a heterologous polynucleotide encoding HSD3B7, the polynucleotide may comprise a nucleic acid sequence of any one of SEQ ID NOs: 82, 84, 86, or 88, or a nucleic acid sequence substantially identical to any of the aforementioned sequences.

[0120] In an embodiment wherein the cell comprises a heterologous polynucleotide encoding CYP8B1, the polynucleotide may comprise a nucleic acid sequence of any one of SEQ ID NOs: 266, 268, 270, 272, 274, 276, or 278, or a nucleic acid sequence substantially identical to any of the aforementioned sequences.

[0121] In an embodiment wherein the cell comprises a heterologous polynucleotide encoding AKR1D1, the polynucleotide may comprise a nucleic acid sequence of any one of SEQ ID NOs: 90, 92, 94, or 96, or a nucleic acid sequence substantially identical to any of the aforementioned sequences.

[0122] In an embodiment wherein the cell comprises a heterologous polynucleotide encoding AKR1C4, the polynucleotide may comprise a nucleic acid sequence of any one of SEQ ID NOs: 100, 102, 104, 106, 108, 110, 112, 114, 116, 118, 120, or 122, or a nucleic acid sequence substantially identical to any of the aforementioned sequences.

[0123] In an embodiment wherein the cell comprises a heterologous polynucleotide encoding CYP27A1, the polynucleotide may comprise a nucleic acid sequence of any one of SEQ ID NOs: 124, 126, 128, 130, 132, 134, 136, or 138, or a nucleic acid sequence substantially identical to any of the aforementioned sequences.

[0124] In an embodiment wherein the cell comprises a heterologous polynucleotide encoding SLC27A5, the polynucleotide may comprise a nucleic acid sequence of SEQ ID NOs: 140 or 142, or a nucleic acid sequence substantially identical to either of the aforementioned sequences.

[0125] In an embodiment wherein the cell comprises a heterologous polynucleotide encoding FAT1, the polynucleotide may comprise a nucleic acid sequence of SEQ ID NO: 144, or a nucleic acid sequence substantially identical therewith.

[0126] In an embodiment wherein the cell comprises a heterologous polynucleotide encoding AMACR, the polynucleotide may comprise a nucleic acid sequence of any one of SEQ ID NOs: 146, 148, 150, 152, 154, 156, or 158, or a nucleic acid sequence substantially identical to any of the aforementioned sequences.

[0127] In an embodiment wherein the cell comprises a heterologous polynucleotide encoding ACOX2, the polynucleotide may comprise a nucleic acid sequence of any one of SEQ ID NOs: 160, 162, 164, 166, 168, 170, 172, or 174, or a nucleic acid sequence substantially identical to any of the aforementioned sequences.

[0128] In an embodiment wherein the cell comprises a heterologous polynucleotide encoding FOX1, the polynucleotide may comprise a nucleic acid sequence of SEQ ID NO: 176, or a nucleic acid sequence substantially identical therewith.

[0129] In an embodiment wherein the cell comprises a heterologous polynucleotide encoding HSD17B4, the polynucleotide may comprise a nucleic acid sequence of any one of SEQ ID NOs: 178, 180, 182, 184, 186, 188, 190, or 192, or a nucleic acid sequence substantially identical to any of the aforementioned sequences.

[0130] In an embodiment wherein the cell comprises a heterologous polynucleotide encoding FOX2, the polynucleotide may comprise a nucleic acid sequence of SEQ ID NO: 194, or a nucleic acid sequence substantially identical therewith.

[0131] In an embodiment wherein the cell comprises a heterologous polynucleotide encoding SCP2, the polynucleotide may comprise a nucleic acid sequence of any one of SEQ ID NOs: 196, 198, 200, or 202, or a nucleic acid sequence substantially identical to any of the aforementioned sequences.

[0132] In an embodiment wherein the cell comprises a heterologous polynucleotide encoding POT1, the polynucleotide may comprise a nucleic acid sequence of SEQ ID NO: 204, or a nucleic acid sequence substantially identical therewith.

[0133] In an embodiment wherein the cell comprises a heterologous polynucleotide encoding ERG10, the polynucleotide may comprise a nucleic acid sequence of SEQ ID NO: 206, or a nucleic acid sequence substantially identical therewith.

[0134] In an embodiment wherein the cell comprises a heterologous polynucleotide encoding 7α-HSD, the polynucleotide may comprise a nucleic acid sequence of any one of SEQ ID NOs: 208, 210, 212, or 214, or a nucleic acid sequence substantially identical to any of the aforementioned sequences.

[0135] In an embodiment wherein the cell comprises a heterologous polynucleotide encoding 7β-HSD, the polynucleotide may comprise a nucleic acid sequence of any one of SEQ ID NOs: 216, 218, 220, or 222, or a nucleic acid sequence substantially identical to any of the aforementioned sequences.

[0136] In an embodiment wherein the cell comprises a heterologous polynucleotide encoding choloyl-CoA hydrolase, the polynucleotide may comprise a nucleic acid sequence of any one of SEQ ID NOs: 224, 226, 228, or 230, or a nucleic acid sequence substantially identical to any of the aforementioned sequences.

[0137] In an embodiment wherein the cell comprises a heterologous polynucleotide encoding AKR1C9, the polynucleotide may comprise a nucleic acid sequence of SEQ ID NO: 98, or a nucleic acid sequence substantially identical therewith.

[0138] In an embodiment wherein the cell comprises a heterologous polynucleotide encoding N-acyltransferase, the polynucleotide may comprise a nucleic acid sequence of SEQ ID NOs: 232, 234, 236, or 238, or a polynucleotide having a nucleotide sequence substantially identical to any of the aforementioned sequences.

[0139] In certain embodiments, the polynucleotide encodes two or more, three or more, four or more, five or more, six or more, seven or more, eight or more, nine or more, ten or more, eleven or more, twelve or more, thirteen or more, fourteen or more, fifteen or more, or sixteen or more such enzymes and/or biologically-active fragments thereof. In certain such embodiments, the enzymes or biologically-active fragments thereof are operably connected along a biosynthetic pathway.

[0140] In certain embodiments, the cell comprises at least one heterologous enzyme, or biologically-active fragment thereof, capable of catalyzing at least one of the following conversions: cholesta-5,7,24-trienol to desmosterol; desmosterol to cholesterol; cholesterol to 7-alpha-hydroxycholesterol; 7-alpha-hydroxycholesterol to 7α-hydroxy-4-cholesten-3-one; 7α-hydroxy-4-cholesten-3-one to 7α-hydroxy-5β-cholestan-3-one; 7α-hydroxy-5β-cholestan-3-one to 5β-cholestane-3α,7α-diol; 5β-cholestane-3α,7α-diol to (25R)-3α,7α-dihydroxy-5β-cholestanoic acid; (25R)-3α,7α-dihydroxy-5β-cholestanoic acid to (25R)-3α,7α-dihydroxy-5β-cholestanoyl-CoA; (25R)-3α,7α-dihydroxy-5β-cholestanoyl-CoA to (25S)-3α,7α-dihydroxy-5β-cholestanoyl-CoA; (25S)-3α,7α-dihydroxy-5β-cholestanoyl-CoA to (24E)-3α,7α-dihydroxy-5β-cholest-24-enoyl-CoA; (24E)-3α,7α-dihydroxy-5β-cholest-24-enoyl-CoA to 3α,7α-dihydroxy-24-oxo-5β-cholestanoyl-CoA; and 3α,7α-dihydroxy-24-oxo-5β-cholestanoyl-CoA to CDC-CoA. In certain embodiments, the cell comprises at least one heterologous polynucleotide encoding such an enzyme or biologically-active fragment thereof.

[0141] In certain embodiments, the cell comprises at least one heterologous enzyme, or biologically-active fragment thereof, that catalyzes at least one of the following conversions: cholesterol to 7-alpha-hydroxycholesterol; 7-alpha-hydroxycholesterol to 7α-hydroxy-4-cholesten-3-one; 7α-hydroxy-4-cholesten-3-one to 7α,12α-dihydroxy-4-cholesten-3-one; 7α,12α-dihydroxy-4-cholesten-3-one to 7α,12α-dihydroxy-5β-cholestan-3-one; 7α,12α-dihydroxy-5β-cholestan-3-one to 5β-cholestane-3α,7α,12α-triol; 5β-cholestane-3α,7α,12α-triol to (25R)-3α,7α,12α-trihydroxy-5β-cholestan-26-oic acid; (25R)-3α,7α,12α-trihydroxy-5β-cholestan-26-oic acid to (25R)-3α,7α,12α-trihydroxy-5β-cholestanoyl-CoA; (25R)-3α,7α,12α-trihydroxy-5β-cholestanoyl-CoA to (25S)-3α,7α,12α-trihydroxy-5β-cholestanoyl-CoA; (25S)-3α,7α,12α-trihydroxy-5β-cholestanoyl-CoA to (24E)-3α,7α,12α-trihydroxy-5β-cholest-24-enoyl-CoA; (24E)-3α,7α,12α-trihydroxy-5β-cholest-24-enoyl-CoA to 3α,7α,12α-trihydroxy-24-oxo-5β-cholestanoyl-CoA; 3α,7α,12α-trihydroxy-24-oxo-5β-cholestanoyl-CoA to 3α,7α,12α-trihydroxy-5β-cholan-24-oyl-CoA; and 3α,7α,12α-trihydroxy-5β-cholan-24-oyl-CoA to cholic acid. In certain embodiments, the cell comprises at least one heterologous polynucleotide encoding such an enzyme or biologically-active fragment thereof.

[0142] In certain embodiments, the cell comprises at least one heterologous enzyme, or biologically-active fragment thereof, that catalyzes at least one of the following conversions: CDC-CoA to 3α-hydroxy-7-oxo-5β-cholan-24-oyl-CoA; 3α-hydroxy-7-oxo-5β-cholan-24-oyl-CoA to 3α,7β-dihydroxy-5β-cholan-24-oyl-CoA; and 3α,7β-dihydroxy-5β-cholan-24-oyl-CoA to UDCA. In certain embodiments, the cell comprises at least one heterologous polynucleotide encoding such an enzyme or biologically-active fragment thereof.

[0143] Additionally, a hydrolase, or biologically-active fragment thereof, can act on the CoA forms of the desired products to make a free acid form of the desired products. In some cases, the free acid form of the desired products can include (25R)-3α,7α-dihydroxy-5β-cholestanoic acid; (25S)-3α,7α(-dihydroxy-5β-cholestanoic acid; (24E)-3α,7α-dihydroxy-5β-cholest-24-enoic acid; 3α,7α-dihydroxy-24-oxo-5β-cholestanoic acid; 3α,7α(-dihydroxy-5β-cholanoic acid (chenodeoxycholic acid; CDCA); 3α-hydroxy-7-oxo-5β-cholanoic acid (nutriacholic acid; NCA); 3α,7β-dihydroxy-5β-cholanoic acid (ursodeoxycholic acid; UDCA); (25R)-3α,7α,12α-trihydroxy-5β-cholestan-26-oic acid; (25S)-3α,7α,12α-trihydroxy-5β-cholestanoic acid; (24E)-3α,7α,12α-trihydroxy-5β-cholest-24-enoic acid; 3α,7α,12α-trihydroxy-24-oxo-5β-cholestanoic acid; cholic acid; or any combination thereof.

[0144] The cell may also be engineered to express heterologous enzymes, or biologically-active fragments thereof, to improve the production of UDCA or UDCA precursor(s).

[0145] In certain embodiments, adrenodoxin reductase (ADR), or a biologically-active fragment thereof, may be used to improve the production of UDCA or UDCA precursor(s). In such an embodiment, the genetically-modified cell may comprise at least one heterologous ADR enzyme or a biologically-active fragment of such an enzyme. In certain embodiments, the enzyme comprises an amino acid sequence of SEQ ID NO: 239, or an amino acid sequence substantially identical therewith. In certain embodiments, the cell may comprise at least one heterologous polynucleotide encoding ADR or a biologically-active fragment thereof. The polynucleotide may comprise a nucleic acid sequence of SEQ ID NO: 240, or a polynucleotide having a nucleotide sequence substantially identical therewith.

[0146] In certain embodiments, adrenodoxin (ADX), or a biologically-active fragment thereof, may be used to improve the production of UDCA or UDCA precursor(s). In such an embodiment, the genetically-modified cell may comprise at least one heterologous ADX enzyme or a biologically-active fragment of such an enzyme. In certain embodiments, the enzyme comprises an amino acid sequence of any one of SEQ ID NO: 241, 243, 245, 247, 249, 251, 253, 255, 257, 259, or 261, or an amino acid sequence substantially identical to any of the aforementioned sequences. In certain embodiments, the cell may comprise at least one heterologous polynucleotide encoding ADX or a biologically-active fragment thereof. The polynucleotide may comprise a nucleic acid sequence of any one of SEQ ID NOs: 242, 244, 246, 248, 250, 252, 254, 256, 258, 260, or 262, or a polynucleotide having a nucleotide sequence substantially identical to any of the aforementioned sequences.

[0147] In certain embodiments, a truncated HMG, or a biologically-active fragment thereof may be used to improve the production of UDCA or UDCA precursor(s). In such an embodiment, the genetically-modified cell may comprise at least one truncated HMG or a biologically-active fragment of such an enzyme. In certain embodiments, the enzyme comprises an amino acid sequence of SEQ ID NO: 263, or an amino acid sequence substantially identical therewith. In certain embodiments, the cell may comprise at least one heterologous polynucleotide encoding truncated HMG or a biologically-active fragment thereof. The polynucleotide may comprise a nucleic acid sequence of SEQ ID NO: 264, or a polynucleotide having a nucleotide sequence substantially identical therewith.

[0148] In certain embodiments, the amino acid sequence of the enzyme is optimized to correspond to amino acid usage within the host cell.

[0149] In certain embodiments, the nucleic acid sequence of the polynucleotide is codon optimized for usage within the host cell.

[0150] The enzymes disclosed throughout can be from a microorganism. For example, the enzymes can be from bacteria, archaea, fungi, protozoa, algae, and/or viruses. The enzymes can also come from an animal, such as mammals, e.g., Homo sapiens and Mus musculus, or from plants, such as Arabidopsis.

[0151] The enzymes or fragments thereof described throughout can also be in some cases fused or linked together. Any fragment linker can be used to link two or more of the enzymes or fragments thereof together. In some cases, the linker can be any random array of amino acid sequences.

[0152] In certain embodiments, the cell is a microorganism or part of one, or part of a plant, animal, or fungus. The microorganism may be yeast, algae, or bacterium. The microorganism may be prokaryotic or eukaryotic. In certain embodiments, the microorganism is a bacterium or a yeast. For example, the microorganism may be Saccharomyces cerevisiae, Yaffoniia lipolytica, or Escherichia coli, or any other cell disclosed throughout.

[0153] In certain embodiments, the microorganism is a yeast. Examples of yeast that may be used include those from the genus Saccharomyces. In certain embodiments, the yeast is of the species Saccharomyces cerevisiae.

[0154] Should the genetically-modified microorganism be a bacterium, the bacterium can be from the genus Escherichia, e.g., Escherichia coli.

[0155] In certain embodiments, the cell is not naturally capable of producing UDCA, cholic acid, and/or other UDCA precursors or produces the same in lower than desired quantities. By implementation of the genetic modification described herein, the cell may be modified such that the level of UDCA, cholic acid, and/or other UDCA precursors therein is higher relative to the level of UDCA, cholic acid, and/or other UDCA precursors in a corresponding unmodified cell.

[0156] In certain embodiments, the cell is naturally capable of catalyzing some, but not all, of the reactions necessary to produce UDCA, cholic acid, and/or other UDCA precursors. For example, the cell may be naturally capable of catalyzing some, but not all, of the conversions in the aforementioned biosynthetic pathways for producing UDCA, cholic acid, and/or other UDCA precursors.

[0157] In certain embodiments, the cell is naturally capable of producing a substrate that may be used to produce UDCA, cholic acid, and/or other UDCA precursors. However, the cell is not naturally capable of producing UDCA, cholic acid, and/or other UDCA precursors. In such embodiments, the genetic modification may serve to allow the cell to convert the substrate into UDCA, CDCA, CDC-CoA, cholic acid, or other UDCA precursors.

[0158] In certain embodiments, the genetically-modified cell is unable to produce a substrate that can be used to produce UDCA, cholic acid, and/or other UDCA precursors. In such embodiments, the substrate may be provided to the cell, for example as part of the cell's growth medium. The cell can then convert this substrate into UDCA, cholic acid, and/or other UDCA precursors.

[0159] In some cases, the genetically modified microorganism can make UDCA or a UDCA precursor, such as CDC-CoA or cholic acid, from one or more substrates.

[0160] Isolated Polynucleotides

[0161] The present invention relates in part to an isolated polynucleotide encoding an enzyme involved in a biosynthetic pathway that produces UDCA, cholic acid, and/or another UDCA precursor. In other words, the gene can be in a form that does not exist in nature, isolated from a chromosome. The isolated polynucleotide may encode at least one of the aforementioned enzymes and may comprise any one of the respective sequences encoding such an enzyme.

[0162] The isolated polynucleotides can be inserted into the genome of the cell/microorganism used. In some cases, the isolated polynucleotide is inserted into the genome at a specific locus, where the isolated polynucleotide can be expressed in sufficient amounts.

[0163] In certain embodiments, the isolated polynucleotide encodes at least one enzyme, or biologically-active fragment thereof, capable of catalyzing at least one of the following conversions: cholesta-5,7,24-trienol to desmosterol; desmosterol to cholesterol; cholesterol to 7-alpha-hydroxycholesterol; 7-alpha-hydroxycholesterol to 7α-hydroxy-4-cholesten-3-one; 7α-hydroxy-4-cholesten-3-one to 7α-hydroxy-5β-cholestan-3-one; 7α-hydroxy-5β-cholestan-3-one to 5β-cholestane-3α,7α-diol; 5β-cholestane-3α,7α-diol to (25R)-3α,7α-dihydroxy-5β-cholestanoic acid; (25R)-3α,7α-dihydroxy-5β-cholestanoic acid to (25R)-3α,7α-dihydroxy-5β-cholestanoyl-CoA; (25R)-3α,7α-dihydroxy-5β-cholestanoyl-CoA to (25S)-3α,7α-dihydroxy-5β-cholestanoyl-CoA; (25S)-3α,7α-dihydroxy-5β-cholestanoyl-CoA to (24E)-3α,7α-dihydroxy-5β-cholest-24-enoyl-CoA; (24E)-3α,7α-dihydroxy-5β-cholest-24-enoyl-CoA to 3α,7α-dihydroxy-24-oxo-5β-cholestanoyl-CoA; 3α,7α-dihydroxy-24-oxo-5β-cholestanoyl-CoA to CDC-CoA.

[0164] In certain embodiments, the isolated polynucleotide encodes at least one enzyme, or biologically-active fragment thereof, that catalyzes at least one of the following conversions: cholesterol to 7-alpha-hydroxycholesterol; 7-alpha-hydroxycholesterol to 7α-hydroxy-4-cholesten-3-one; 7α-hydroxy-4-cholesten-3-one to 7α,12α-dihydroxy-4-cholesten-3-one; 7α,12α-dihydroxy-4-cholesten-3-one to 7α,12α-dihydroxy-5β-cholestan-3-one; 7α,12α-dihydroxy-5β-cholestan-3-one to 5β-cholestane-3α,7α,12α-triol; 5β-cholestane-3α,7α,12α-triol to (25R)-3α,7α,12α-trihydroxy-5β-cholestan-26-oic acid; (25R)-3α,7α,12α-trihydroxy-5β-cholestan-26-oic acid to (25R)-3α,7α,12α-trihydroxy-5β-cholestanoyl-CoA; (25R)-3α,7α,12α-trihydroxy-5β-cholestanoyl-CoA to (25S)-3α,7α,12α-trihydroxy-5β-cholestanoyl-CoA; (25S)-3α,7α,12α-trihydroxy-5β-cholestanoyl-CoA to (24E)-3α,7α,12α-trihydroxy-5β-cholest-24-enoyl-CoA; (24E)-3α,7α,12α-trihydroxy-5β-cholest-24-enoyl-CoA to 3α,7α,12α-trihydroxy-24-oxo-5β-cholestanoyl-CoA; 3α,7α,12α-trihydroxy-24-oxo-5β-cholestanoyl-CoA to 3α,7α,12α-trihydroxy-5β-cholan-24-oyl-CoA; and 3α,7α,12α-trihydroxy-5β-cholan-24-oyl-CoA to cholic acid.

[0165] In certain embodiments, the isolated polynucleotide encodes at least one enzyme, or biologically-active fragment thereof, that catalyzes at least one of the following conversions: CDC-CoA to 3α-hydroxy-7-oxo-5β-cholan-24-oyl-CoA; 3α-hydroxy-7-oxo-5β-cholan-24-oyl-CoA to 3α,7α-dihydroxy-5β-cholan-24-oyl-CoA; and 3α,7β-dihydroxy-5β-cholan-24-oyl-CoA to UDCA.

[0166] In certain embodiments, the isolated polynucleotide encodes DHCR7, DHCR24, CYP7A1, HSD3B7, CYP8B1, AKR1D1, AKR1C4, CYP27A1, SLC27A5, AMACR, ACOX2, HSD17B4, SCP2, 7α-HSD, 7β-HSD, choloyl-CoA hydrolase, AKR1C9, and/or N-acyltransferase, and/or a biologically-active fragment of such an enzyme.

[0167] In an embodiment wherein the isolated polynucleotide encodes DHCR7, the isolated polynucleotide comprises a nucleic acid sequence of any one of SEQ ID NOs: 2, 4, 6, 8, 10, or 12, or a nucleic acid sequence substantially identical to any of the aforementioned sequences.

[0168] In an embodiment wherein the isolated polynucleotide encodes DHCR24, the isolated polynucleotide comprises a nucleic acid sequence of any one of SEQ ID NOs: 14, 15, 16, 18, 19, 20, 22, 23, 24, 26, 27, 28, 30, 31, 32, 34, 35, 36, 38, 39, 40, 42, 44, 46, or 48, or a nucleic acid sequence substantially identical to any of the aforementioned sequences.

[0169] In an embodiment wherein the isolated polynucleotide encodes CYP7A1, the isolated polynucleotide comprises a nucleic acid sequence of any one of SEQ ID NOs: 50, 52, 54, 56, 58, 60, 62, 64, 66, 68, 70, 72, 74, 76, 78, or 80, or a nucleic acid sequence substantially identical to any of the aforementioned sequences.

[0170] In an embodiment wherein the isolated polynucleotide encodes HSD3B7, the isolated polynucleotide comprises a nucleic acid sequence of any one of SEQ ID NOs: 82, 84, 86, or 88, or a nucleic acid sequence substantially identical to any of the aforementioned sequences.

[0171] In an embodiment wherein the isolated polynucleotide encodes CYP8B1, the isolated polynucleotide comprises a nucleic acid sequence of any one of SEQ ID NOs: 266, 268, 270, 272, 274, 276, or 278, or a nucleic acid sequence substantially identical to any of the aforementioned sequences.

[0172] In an embodiment wherein the isolated polynucleotide encodes AKR1D1, the isolated polynucleotide comprises a nucleic acid sequence of any one of SEQ ID NOs: 90, 92, 94, or 96, or a nucleic acid sequence substantially identical to any of the aforementioned sequences.

[0173] In an embodiment wherein the isolated polynucleotide encodes AKR1C4, the isolated polynucleotide comprises a nucleic acid sequence of any one of SEQ ID NOs: 100, 102, 104, 106, 108, 110, 112, 114, 116, 118, 120, or 122, or a nucleic acid sequence substantially identical to any of the aforementioned sequences.

[0174] In an embodiment wherein the isolated polynucleotide encodes CYP27A1, the isolated polynucleotide comprises a nucleic acid sequence of any one of SEQ ID NOs: 124, 126, 128, 130, 132, 134, 136, or 138, or a nucleic acid sequence substantially identical to any of the aforementioned sequences.

[0175] In an embodiment wherein the isolated polynucleotide encodes SLC27A5, the isolated polynucleotide comprises a nucleic acid sequence of SEQ ID NOs: 140 or 142, or a nucleic acid sequence substantially identical to either of the aforementioned sequences.

[0176] In an embodiment wherein the isolated polynucleotide encodes FAT1, the isolated polynucleotide comprises a nucleic acid sequence of SEQ ID NO: 144, or a nucleic acid sequence substantially identical therewith.

[0177] In an embodiment wherein the isolated polynucleotide encodes AMACR, the isolated polynucleotide comprises a nucleic acid sequence of any one of SEQ ID NOs: 146, 148, 150, 152, 154, 156, or 158, or a nucleic acid sequence substantially identical to any of the aforementioned sequences.

[0178] In an embodiment wherein the isolated polynucleotide encodes ACOX2, the isolated polynucleotide comprises a nucleic acid sequence of any one of SEQ ID NOs: 160, 162, 164, 166, 168, 170, 172, or 174, or a nucleic acid sequence substantially identical to any of the aforementioned sequences.

[0179] In an embodiment wherein the isolated polynucleotide encodes FOX1, the isolated polynucleotide comprises e a nucleic acid sequence of SEQ ID NO: 176, or a nucleic acid sequence substantially identical therewith.

[0180] In an embodiment wherein the isolated polynucleotide encodes HSD17B4, the isolated polynucleotide comprises a nucleic acid sequence of any one of SEQ ID NOs: 178, 180, 182, 184, 186, 188, 190, or 192, or a nucleic acid sequence substantially identical to any of the aforementioned sequences.

[0181] In an embodiment wherein the isolated polynucleotide encodes FOX2, the isolated polynucleotide comprises a nucleic acid sequence of SEQ ID NO: 194, or a nucleic acid sequence substantially identical therewith.

[0182] In an embodiment wherein the isolated polynucleotide encodes SCP2, the isolated polynucleotide comprises a nucleic acid sequence of any one of SEQ ID NOs: 196, 198, 200, or 202, or a nucleic acid sequence substantially identical to any of the aforementioned sequences.

[0183] In an embodiment wherein the isolated polynucleotide encodes POT1, the isolated polynucleotide comprises a nucleic acid sequence of SEQ ID NO: 204, or a nucleic acid sequence substantially identical therewith.

[0184] In an embodiment wherein the isolated polynucleotide encodes ERG10, the isolated polynucleotide comprises e a nucleic acid sequence of SEQ ID NO: 206, or a nucleic acid sequence substantially identical therewith.

[0185] In an embodiment wherein the isolated polynucleotide encodes 7α-HSD, the isolated polynucleotide comprises a nucleic acid sequence of any one of SEQ ID NOs: 208, 210, 212, or 214, or a nucleic acid sequence substantially identical to any of the aforementioned sequences.

[0186] In an embodiment wherein the isolated polynucleotide encodes 7β-HSD, the isolated polynucleotide comprises a nucleic acid sequence of any one of SEQ ID NOs: 216, 218, 220, or 222, or a nucleic acid sequence substantially identical to any of the aforementioned sequences.

[0187] In an embodiment wherein the isolated polynucleotide encodes choloyl-CoA hydrolase, the isolated polynucleotide comprises a nucleic acid sequence of any one of SEQ ID NOs: 224, 226, 228, or 230, or a nucleic acid sequence substantially identical to any of the aforementioned sequences.

[0188] In an embodiment wherein the isolated polynucleotide encodes AKR1C9, the isolated polynucleotide comprises a nucleic acid sequence of any one of SEQ ID NO: 98, or a nucleic acid sequence substantially identical therewith.

[0189] In an embodiment wherein the isolated polynucleotide encodes N-acyltransferase, the isolated polynucleotide comprises a nucleic acid sequence of any one of SEQ ID NOs: 232, 234, 236, or 238, or a polynucleotide having a nucleotide sequence substantially identical to any of the aforementioned sequences.

[0190] The isolated polynucleotide may also encode at least one enzyme that improves the production of UDCA, cholic acid, and/or other UDCA precursors, such as ADR, ADX, and/or a truncated HMG, and/or a biologically-active fragment of such an enzyme.

[0191] In an embodiment wherein the isolated polynucleotide encodes ADR, the isolated polynucleotide comprises a nucleic acid sequence of any one of SEQ ID NO: 240, or a polynucleotide having a nucleotide sequence substantially identical therewith.

[0192] In an embodiment wherein the isolated polynucleotide encodes ADX, the isolated polynucleotide comprises a nucleic acid sequence of any one of SEQ ID NOs: 242, 244, 246, 248, 250, 252, 254, 256, 258, 260, or 262, or a polynucleotide having a nucleotide sequence substantially identical to any of the aforementioned sequences.

[0193] In an embodiment wherein the isolated polynucleotide encodes truncated HMG, the isolated polynucleotide comprises a nucleic acid sequence of any one of SEQ ID NO: 264, or a polynucleotide having a nucleotide sequence substantially identical therewith.

[0194] Vectors

[0195] Since some of the enzymes and biologically-active fragments thereof described throughout are not native to some cells and microorganisms, expression vectors can be used to express the desired enzymes and/or fragments within most microorganisms and cells. The present invention thus also relates in part to a vector comprising a polynucleotide as described previously encoding an enzyme, or biologically-active fragment thereof, involved in a biosynthetic pathway that produces UDCA, cholic acid, and/or another UDCA precursor.

[0196] Vector constructs prepared for introduction into the host cells or microorganisms described throughout can typically, but not always, comprise a replication system (i.e. vector) recognized by the host. In some cases, the vector includes the intended polynucleotide fragment encoding the desired enzyme or fragment thereof and, optionally, transcription and translational initiation regulatory sequences operably linked to the polypeptide-encoding segment. Expression vectors can include, for example, an origin of replication or autonomously replicating sequence (ARS), expression control sequences, a promoter, an enhancer and necessary processing information sites, such as ribosome-binding sites, RNA splice sites, polyadenylation sites, transcriptional terminator sequences, mRNA stabilizing sequences, polynucleotides homologous to host chromosomal DNA, and/or a multiple cloning site. Signal peptides can also be included where appropriate, for example from secreted polypeptides of the same or related species, that allow the protein to cross and/or lodge in cell membranes or be secreted from the cell.

[0197] The expression vector may be introduced into the host cell stably or transiently into a host cell, using established techniques, including, but not limited to, electroporation, calcium phosphate precipitation, DEAE-dextran mediated transfection, liposome-mediated transfection, heat shock in the presence of lithium acetate, and the like. For stable transformation, a nucleic acid will generally further include a selectable marker, e.g., any of several well-known selectable markers such as neomycin resistance, ampicillin resistance, tetracycline resistance, chloramphenicol resistance, kanamycin resistance, and the like. In some embodiments, the nucleic acid with which the host cell is genetically modified is an expression vector that includes a nucleic acid comprising a nucleotide sequence that encodes a gene product, e.g., an enzyme, a transcription factor, etc.

[0198] Suitable expression vectors include, but are not limited to, baculovirus vectors, bacteriophage vectors, plasmids, phagemids, cosmids, fosmids, bacterial artificial chromosomes, viral vectors (e.g. viral vectors based on vaccinia virus, poliovirus, adenovirus, adeno-associated virus, SV40, herpes simplex virus, and the like), P1-based artificial chromosomes, yeast plasmids, yeast artificial chromosomes, and any other vectors specific for specific hosts of interest (such as yeast). Thus, for example, a nucleic acid encoding a gene product(s) is included in any one of a variety of expression vectors for expressing the gene product(s). Such vectors include chromosomal, nonchromosomal and synthetic DNA sequences.

[0199] In some cases, the promoter used in the vector can be sensitive to a chemical substance. For example, in the presence of the chemical substance, the promoter is either activated or deactivated. In some cases, the chemical substance can be a sugar such as glucose or galactose. In some cases, the chemical substance can be copper. In some cases, the chemical substance can be a rare earth metal. In some cases, the rare earth metal can be lanthanum or cerium. In some cases, the rare earth metal can be praseodymium or neodymium.

[0200] The vectors can be constructed using standard methods (see, e.g., Sambrook et al., Molecular Biology: A Laboratory Manual, Cold Spring Harbor, N.Y. 1989; and Ausubel, et al., Current Protocols in Molecular Biology, Greene Publishing, Co. N.Y, 1995).

[0201] Manipulation of polynucleotides that encode the enzymes or biologically-active fragments thereof disclosed throughout is typically carried out in recombinant vectors. Vectors that can be employed include yeast plasmids, bacterial plasmids, bacteriophage, artificial chromosomes, episomal vectors and gene expression vectors. Vectors can be selected to accommodate a polynucleotide encoding a protein of a desired size. Following production of a selected vector, a suitable host cell (e.g., the microorganisms described herein) is transfected or transformed with the vector. Each vector contains various functional components, which generally include a cloning site and an origin of replication. In some cases, the vector comprises at least one selectable marker gene. A vector can additionally possess one or more of the following elements: an enhancer, promoter, a transcription termination sequence and/or other signal sequences. Such sequence elements can be optimized for the selected host species. Such sequence elements can be positioned in the vicinity of the cloning site, such that they are operatively linked to the gene encoding a preselected enzyme.

[0202] Vectors, including cloning and expression vectors, can contain polynucleotides that enable the vector to replicate in one or more selected microorganisms. For example, the sequence can be one that enables the vector to replicate independently of the host chromosomal DNA and can include origins of replication or autonomously replicating sequences. Such sequences are well known for a variety of bacteria, yeast and viruses. For example, the origin of replication from the plasmid pBR322 is suitable for most gram-negative bacteria, the origin of replication for 2 micron plasmid is suitable for yeast, and various viral origins of replication (e.g., SV40, adenovirus) are useful for cloning vectors.

[0203] A cloning or expression vector can contain a selection gene, also referred to as a selectable marker. This gene encodes a protein necessary for the survival or growth of transformed microorganisms in a selective culture medium. Microorganisms not transformed with the vector containing the selection gene will therefore not survive in the culture medium. Typical selection genes encode proteins that confer resistance to antibiotics and other toxins, e.g. ampicillin, neomycin, methotrexate, hygromycin, kanamyxin, thiostrepton, apramycin or tetracycline, complement auxotrophic deficiencies, or supply critical nutrients not available in the growth media.

[0204] The replication of vectors can be performed in E. coli. An example of an E. coli-selectable marker is the β-lactamase gene, which confers resistance to the antibiotic ampicillin. These selectable markers can be obtained from E. coli plasmids, such as pBR322 or a pUC plasmid such as pUC18 or pUC19, or pUC119.

[0205] In an embodiment wherein the vector comprises a polynucleotide encoding DHCR7, the isolated vector may comprise a nucleic acid sequence of any one of SEQ ID NOs: 2, 4, 6, 8, 10, or 12, or a nucleic acid sequence substantially identical to any of the aforementioned sequences.

[0206] In an embodiment wherein the vector comprises a polynucleotide encoding DHCR24, the isolated vector may comprise nucleic acid sequence of any one of SEQ ID NOs: 14, 15, 16, 18, 19, 20, 22, 23, 24, 26, 27, 28, 30, 31, 32, 34, 35, 36, 38, 39, 40, 42, 44, 46, or 48, or a nucleic acid sequence substantially identical to any of the aforementioned sequences.

[0207] In an embodiment wherein the vector comprises a polynucleotide encoding CYP7A1, the isolated vector may comprise a nucleic acid sequence of any one of SEQ ID NOs: 50, 52, 54, 56, 58, 60, 62, 64, 66, 68, 70, 72, 74, 76, 78, or 80, or a nucleic acid sequence substantially identical to any of the aforementioned sequences.

[0208] In an embodiment wherein the vector comprises a polynucleotide encoding HSD3B7, the isolated vector may comprise a nucleic acid sequence of any one of SEQ ID NOs: 82, 84, 86, or 88, or a nucleic acid sequence substantially identical to any of the aforementioned sequences.

[0209] In an embodiment wherein the vector comprises a polynucleotide encoding CYP8B1, the isolated vector may comprise a nucleic acid sequence of any one of SEQ ID NOs: 50, 52, 54, 56, 58, 60, 62, 64, 66, 68, 70, 72, 74, 76, 78, or 80, or a nucleic acid sequence substantially identical to any of the aforementioned sequences.

[0210] In an embodiment wherein the vector comprises a polynucleotide encoding AKR1D1, the isolated vector may comprise a nucleic acid sequence of any one of SEQ ID NOs: 90, 92, 94, or 96, or a nucleic acid sequence substantially identical to any of the aforementioned sequences.

[0211] In an embodiment wherein the vector comprises a polynucleotide encoding AKR1C4, the isolated vector may comprise a nucleic acid sequence of any one of SEQ ID NOs: 100, 102, 104, 106, 108, 110, 112, 114, 116, 118, 120, or 122, or a nucleic acid sequence substantially identical to any of the aforementioned sequences.

[0212] In an embodiment wherein the vector comprises a polynucleotide encoding CYP27A1, the isolated vector may comprise a nucleic acid sequence of any one of SEQ ID NOs: 124, 126, 128, 130, 132, 134, 136, or 138, or a nucleic acid sequence substantially identical to any of the aforementioned sequences.

[0213] In an embodiment wherein the vector comprises a polynucleotide encoding SLC27A5, the isolated vector may comprise a nucleic acid sequence of SEQ ID NOs: 140 or 142, or a nucleic acid sequence substantially identical to either of the aforementioned sequences.

[0214] In an embodiment wherein the vector comprises a polynucleotide encoding FAT1, the isolated vector may comprise a nucleic acid sequence of SEQ ID NO: 144, or a nucleic acid sequence substantially identical therewith.

[0215] In an embodiment wherein the vector comprises a polynucleotide encoding AMACR, the isolated vector may comprise a nucleic acid sequence of SEQ ID NOs: 146, 148, 150, 152, 154, 156, or 158, or a nucleic acid sequence substantially identical to any of the aforementioned sequences.

[0216] In an embodiment wherein the vector comprises a polynucleotide encoding ACOX2, the isolated vector may comprise a nucleic acid sequence of SEQ ID NOs: 160, 162, 164, 166, 168, 170, 172, or 174, or a nucleic acid sequence substantially identical to any of the aforementioned sequences.

[0217] In an embodiment wherein the vector comprises a polynucleotide encoding FOX1, the isolated vector may comprise a nucleic acid sequence of SEQ ID NO: 176, or a nucleic acid sequence substantially identical therewith.

[0218] In an embodiment wherein the vector comprises a polynucleotide encoding HSD17B4, the isolated vector may comprise a nucleic acid sequence of SEQ ID NOs: 178, 180, 182, 184, 186, 188, 190, or 192, or a nucleic acid sequence substantially identical to any of the aforementioned sequences.

[0219] In an embodiment wherein the vector comprises a polynucleotide encoding FOX2, the isolated vector may comprise a nucleic acid sequence of SEQ ID NO: 194, or a nucleic acid sequence substantially identical therewith.

[0220] In an embodiment wherein the vector comprises a polynucleotide encoding SCP2, the isolated vector may comprise a nucleic acid sequence of any one of SEQ ID NOs: 196, 198, 200, or 202, or a nucleic acid sequence substantially identical to any of the aforementioned sequences.

[0221] In an embodiment wherein the vector comprises a polynucleotide encoding POT1, the isolated vector may comprise a nucleic acid sequence of SEQ ID NO: 204, or a nucleic acid sequence substantially identical therewith.

[0222] In an embodiment wherein the vector comprises a polynucleotide encoding ERG10, the isolated vector may comprise a nucleic acid sequence of SEQ ID NO: 206, or a nucleic acid sequence substantially identical therewith.

[0223] In an embodiment wherein the vector comprises a polynucleotide encoding 7α-HSD, the isolated vector may comprise a nucleic acid sequence of SEQ ID NOs: 208, 210, 212, or 214, or a nucleic acid sequence substantially identical to any of the aforementioned sequences.

[0224] In an embodiment wherein the vector comprises a polynucleotide encoding 7β-HSD, the isolated vector may comprise a nucleic acid sequence of SEQ ID NOs: 216, 218, 220, or 222, or a nucleic acid sequence substantially identical to any of the aforementioned sequences.

[0225] In an embodiment wherein the vector comprises a polynucleotide encoding choloyl-CoA hydrolase, the isolated vector may comprise a nucleic acid sequence of SEQ ID NOs: 224, 226, 228, or 230, or a nucleic acid sequence substantially identical to any of the aforementioned sequences.

[0226] In an embodiment wherein the vector comprises a polynucleotide encoding AKR1C9, the isolated vector may comprise a nucleic acid sequence of SEQ ID NO: 98, or a nucleic acid sequence substantially identical therewith.

[0227] In an embodiment wherein the vector comprises a polynucleotide encoding N-acyltransferase, the isolated vector may comprise a nucleic acid sequence of SEQ ID NOs: 232, 234, 236, or 238, or a polynucleotide having a nucleotide sequence substantially identical to any of the aforementioned sequences.

[0228] In an embodiment wherein the vector comprises a polynucleotide encoding ADR, the isolated vector may comprise a nucleic acid sequence of SEQ ID NO: 240, or a polynucleotide having a nucleotide sequence substantially identical therewith.

[0229] In an embodiment wherein the vector comprises a polynucleotide encoding ADX, the isolated vector may comprise a nucleic acid sequence of SEQ ID NOs: 242, 244, 246, 248, 250, 252, 254, 256, 258, 260, or 262, or a polynucleotide having a nucleotide sequence substantially identical to any of the aforementioned sequences.

[0230] In an embodiment wherein the vector comprises a polynucleotide encoding truncated HMG, the isolated vector may comprise a nucleic acid sequence of SEQ ID NO: 264, or a polynucleotide having a nucleotide sequence substantially identical therewith.

[0231] Promoters

[0232] Vectors can contain a promoter that is recognized by the host microorganism. The promoter can be operably linked to a coding sequence of interest. Such a promoter can be inducible, repressible, or constitutive. Polynucleotides are operably linked when the polynucleotides are in a relationship permitting them to function in their intended manner.

[0233] Different promoters can be used to drive the expression of the genes. For example, if temporary gene expression (i e. , non-constitutively expressed) is desired, expression can be driven by inducible or repressible promoters. The molecular switch can in some cases comprise these inducible or repressible promoters.

[0234] In some cases, the desired gene is expressed temporarily. In other words, the desired gene is not constitutively expressed. The expression of the desired gene can be driven by an inducible or repressible promoter, which functions as a molecular switch. Examples of inducible or repressible switches include, but are not limited to, those promoters inducible or repressible by: (a) sugars such as glucose, galactose, arabinose, and lactose (or non-metabolizable analogs, e.g., isopropyl β-D-1-thiogalactopyranoside (IPTG)); (b) metals such as copper or calcium (or rare earth metals such as lanthanum or cerium); (c) temperature; (d) Nitrogen-source; (e) oxygen; (f) cell state (growth or stationary); (g) metabolites such as phosphate; (h) CRISPRi; (i) jun; (j) fos, (k) metallothionein and/or (1) heat shock.

[0235] Inducible or repressible switches that can be particularly useful are switches that are responsive to sugars, metal ions, and rare earth metals. For example, promoters that are sensitive to arabinose, glucose, and/or galactose can be used as such switches. In some cases, such switches can be used to drive expression of one or more genes. For example, in the presence such a sugar, the arabinose or glucose to galactose switch can turn on the expression of a desired gene.

[0236] In particular embodiments, the switch is a GAL1 or GAL10 promoter. Such promoters are strongly repressed in the presence of glucose and depletion of glucose removes repression but does not necessarily trigger induction. However, in the presence of galactose, expression is strongly induced. To further achieve strong levels of expression, the GAL80 gene, which encodes a transcriptional repressor involved in transcriptional regulation mediated by galactose, may be knocked-out.

[0237] Metal ion switches of particular usefulness in this invention are copper sensitive switches. In some cases, the copper switch can be an inducible switch that can be used to “turn on” expression of one or more genes when copper is present in the environment. In the absence of copper in the media, the desired gene set or vector is not highly expressed.

[0238] Other useful switches can be rare earth metal switches, such as lanthanum sensitive switches (also simply known as a lanthanum switch). In some cases, the lanthanum switch can be a repressible switch that can be used to repress expression of one or more genes, until the repressor is removed (e.g., in this case lanthanum), after which the genes are “turned-on”. For example, in the presence the rare earth metal lanthanum, the desired gene set or vector can be “turned-off.” The expression of the genes is induced by either removing the lanthanum from the media or diluting the lanthanum in the media to levels where its repressible effects are reduced, minimized, or eliminated. Other rare earth metal switches can be used, such as those disclosed throughout.

[0239] Constitutively expressed promoters can also be used in the vector systems herein. For example, the expression of one or more desired genes can be controlled by constitutively active promoters. Examples of such promoters include but are not limited to pPGK1, pTDH3, pENO1, pTEF1, pHIS4, pUGA1, pADH1, pADH2, pGAL1, pGAL10, pGAL1/10, pXoxF, pMxaF, and p.Bba.J23111.

[0240] Promoters suitable for use with prokaryotic hosts can include, for example, the a-lactamase and lactose promoter systems, alkaline phosphatase, the tryptophan (trp) promoter system, the erythromycin promoter, apramycin promoter, hygromycin promoter, methylenomycin promoter and hybrid promoters such as the tac promoter. Promoters for use in bacterial systems will also generally contain a Shine-Dalgarno sequence operably linked to the coding sequence.

[0241] Promoters suitable for use with eukaryotic hosts can include, for example, galactose promoters, copper promoters, tetracycline promoters, glucose repressible promoters such as pGAL1 and pGAL10, low glucose induced promoters such as pADH2 and pHXT7, and high glucose induced promoters such as pHXT3. Such promoters will also generally contain a Kozak sequence operably linked to the coding sequence.

[0242] Generally, a strong promoter can be employed to provide for high level transcription and expression of the desired product. For example, promoters that can be used include but are not limited to pMxaF, pTDH3, pPGK1, pENO2, pTEF1, pTEF2, pADH1, pCCW12, pGAL1 and pGAL10. In some cases, a mutation can increase the strength of the promoter and therefore result in elevated levels of expression.

[0243] In some cases however, a weaker promoter is desired. For example, this is the case where too much expression of a certain gene results in a detrimental effect (e.g., the killing of cells). A weak promoter can be used, for example pPHO84, pPFK1, pCDC19, pBAD, pPHO84, pPFK1, pCLN1, pCYC1, pUGA1, pRAT1, and pPFK12. However, in some cases, a weaker promoter can be made by mutation. For example, the pmxaF promoters can be mutated to be weaker.

[0244] One or more promoters of a transcription unit can be an inducible promoter. For example, a GFP can be expressed from a constitutive promoter while an inducible promoter is used to drive transcription of a gene coding for one or more enzymes as disclosed herein and/or the amplifiable selectable marker.

[0245] Some vectors can contain sequences that facilitate the propagation of the vector in the host cell. Thus, the vectors can have other components such as an origin of replication (e.g., a polynucleotide that enables the vector to replicate in one or more selected microorganisms), antibiotic resistance genes for selection, and/or an amber stop codon that can permit translation to read through the codon. Additional selectable gene(s) can also be incorporated. Generally, in cloning vectors, the origin of replication is one that enables the vector to replicate independently of the host chromosomal DNA, and includes origins of replication or autonomously replicating sequences. Such sequences can include the ColE1 origin of replication in bacteria, a 2 micron origin of replication in yeast, or other known sequences.

[0246] The genes described throughout can all have a promoter driving their expression. The methods described herein, e.g., genome editing, can be used to edit the polynucleotide of the promoters or used to inhibit the effectiveness of the promoters. Inhibition can be done by blocking the transcription machinery (e.g., transcription factors) from binding to the promoter or by altering the promoter in such a way that the transcription machinery no longer recognizes the promoter sequence.

[0247] Methods of Making a Genetically-Modified Cell

[0248] The present invention relates in part to a method for making the previously-described genetically-modified cell. The method comprises contacting a cell with at least one heterologous polynucleotide encoding an enzyme involved in a biosynthetic pathway that produces UDCA, cholic acid, and/or another UDCA precursor, or a biologically-active fragment of such an enzyme. Such polynucleotides are as described previously. The method may further comprise growing the cell so that the heterologous polynucleotide is inserted into the cell.

[0249] In certain embodiments, the cell is contacted with at least two such heterologous polynucleotides. In such embodiments, the heterologous polynucleotides may encode enzymes and/or fragments thereof that are operably connected along the pathway.

[0250] In certain embodiments, the heterologous polynucleotide(s) are comprised in a vector, as discussed previously.

[0251] The genetically-modified cells and microorganisms disclosed throughout can be made in a variety of ways. For example, the cell or microorganism may be modified (e.g., genetically-engineered) by any method to comprise and/or express one or more polynucleotides encoding enzymes and/or fragments thereof in a pathway. For example, one or more of any of the genes discussed throughout can be inserted into a cell or microorganism. The genes can be inserted by an expression vector. The genes can also be under the control of one or more different/same promoters or the one or more genes can be under the control of a switch, such as an inducible or repressible promoter, e.g., an arabinose switch, glucose to galactose switch, isopropyl 13-D-1-thiogalactopyranoside (IPTG) switch, copper switch, or a rare earth metal switch. The genes can also be stably integrated into the genome of the microorganism. In some cases, the genes can be expressed in an episomal vector.

[0252] An exemplary method of making a genetically modified cell or microorganism disclosed herein is contacting (or transforming) a cell/microorganism with a polynucleotide encoding at least one of the enzymes described previously, or a fragment thereof. The polynucleotides that are inserted into the microorganism can be heterologous to the cell/microorganism itself. For example, if the microorganism is a yeast, the inserted polynucleotides can be from a bacterium, or a different species of yeast. Further, the polynucleotides can be endogenously part of the genome of the cell/microorganism.

[0253] In some embodiments, the method of the invention further comprises isolating the UDCA, cholic acid, and/or other UDCA precursor from the host microorganism and/or from the culture medium.

[0254] In certain embodiments, a UDCA precursor produced using a genetically-modified cell/microorganism is contacted with an unmodified cell that converts the UDCA precursor into another UDCA precursor or UDCA.

[0255] In certain embodiments, the UDCA precursor produced is not a substrate for further reactions.

[0256] In general, the genetically-modified host cell/microorganism is cultured in a suitable medium, optionally supplemented with one or more additional agents, such as an inducer (e.g., where one or more nucleotide sequences encoding a gene product is under the control of an inducible promoter). In some embodiments, the culture medium is overlaid with an organic solvent, e.g., dodecane, forming an organic layer. In such cases, the UDCA, cholic acid, and/or other UDCA precursor produced by the genetically-modified host cell/microorganism may partition into the organic layer, from which it can be purified. In some embodiments, where one or more gene product-encoding nucleotide sequence is operably linked to an inducible promoter, an inducer is added to the culture medium; and, after a suitable time, the UDCA, cholic acid, and/or other UDCA precursor is isolated from the organic layer overlaid on the culture medium.

[0257] In some embodiments, the UDCA, cholic acid, and/or other UDCA precursor is separated from other products which may be present in the organic layer. Such separation may be achieved using, e.g., standard chromatographic techniques.

[0258] In some embodiments, the UDCA, cholic acid, and/or other UDCA precursor is substantially pure.

[0259] Techniques for Genetic Modification

[0260] The cells/microorganisms disclosed herein can be genetically engineered by using classic microbiological techniques. Some of such techniques are generally disclosed, for example, in Sambrook et al., 1989, Molecular Cloning: A Laboratory Manual, Cold Spring Harbor Labs Press.

[0261] The genetically modified cells/microorganisms disclosed herein can include a polynucleotide that has been inserted, deleted or modified (i .e. , mutated; e.g., by insertion, deletion, substitution, and/or inversion of nucleotides), in such a manner that such modifications provide the desired effect of expression (e.g., over-expression) of one or more enzymes as provided herein within the cell/microorganism. Genetic modifications that result in an increase in gene expression or function can be referred to as amplification, overproduction, overexpression, activation, enhancement, addition, or up-regulation of a gene. Addition of a gene to increase gene expression can include maintaining the gene(s) on replicating plasmids or integrating the cloned gene(s) into the genome of the production cell/microorganism. Furthermore, increasing the expression of desired genes can include operatively linking the cloned gene(s) to native or heterologous transcriptional control elements.

[0262] Another way of increasing expression of desired genes can be the integration of multiple copies of genes into the genome. This can be accomplished in several ways. For example, the same cloned gene may be inserted into more than one locus (typically on different chromosomes) in the genome. Alternatively, different variations of the cloned gene, for example different promoter/terminator combinations, may be introduced into more than one locus. A combination of gene expression on a plasmid in addition to chromosomal expression could be used. Random integration techniques can also be used in which the location and copy number of an integrated gene are not known. A less frequently used approach could be to introduce tandem repeats of the gene and expression machinery into a single locus.

[0263] Where desired, the expression of one or more of the enzymes or fragments thereof provided herein is under the control of a regulatory sequence that controls directly or indirectly the expression in a time-dependent fashion during the fermentation. Inducible promoters can be used to achieve this.

[0264] In some cases, a cell/microorganism is transformed or transfected with a genetic vehicle, such as an expression vector comprising a heterologous polynucleotide sequence coding for an enzyme or fragment thereof. In some cases, the vector(s) can be an episomal vector, or the gene sequence can be integrated into the genome of the microorganism, or any combination thereof. In some cases, the vectors comprising the heterologous polynucleotide sequence encoding the enzymes or fragments thereof provided herein are integrated into the genome of the microorganism.

[0265] To facilitate insertion and expression of different genes coding for the enzymes of interest or fragments thereof, the constructs or expression vectors can be designed with at least one cloning site for insertion of any gene coding for such enzyme or fragment. The cloning site can be a multiple cloning site, e.g., containing multiple restriction sites.

[0266] Transfection and Transformation

[0267] Standard transfection techniques can be used to insert genes into a microorganism. As used herein, the term “transfection” or “transformation” can refer to the insertion of an exogenous nucleic acid or polynucleotide into a host cell. The exogenous nucleic acid or polynucleotide can be maintained as a non-integrated vector, for example, a plasmid or episomal vector, or alternatively, can be integrated into the host cell genome. The term transfecting or transfection is intended to encompass all conventional techniques for introducing nucleic acid or polynucleotide into cells/microorganisms. Examples of transfection techniques include, but are not limited to, lithium acetate mediated transformation, calcium phosphate precipitation, DEAE-dextran-mediated transfection, lipofection, electroporation, microinjection, rubidium chloride or polycation mediated transfection, protoplast fusion, and sonication. The transfection method that provides optimal transfection frequency and expression of the construct in the particular host cell line and type is favored. For stable transfectants, the constructs are integrated so as to be stably maintained within the host chromosome. In some cases, the preferred transfection is a stable transfection. In some cases, the integration of the gene occurs at a specific locus within the genome of the microorganism.

[0268] Expression vectors or other nucleic acids can be introduced to selected cells/microorganisms by any of a number of suitable methods. For example, vector constructs can be introduced to appropriate cells by any of a number of transformation methods. Standard calcium chloride-mediated bacterial transformation is still commonly used to introduce naked DNA to bacteria (see, e.g., Sambrook et al., 1989, Molecular Cloning, A Laboratory Manual, Cold Spring Harbor Laboratory Press, Cold Spring Harbor, N.Y.), but electroporation and conjugation can also be used (see, e.g., Ausubel et al., 1988, Current Protocols in Molecular Biology, John Wiley & Sons, Inc., NY, N.Y.).

[0269] For the introduction of vector constructs to yeast or other fungal cells, chemical transformation and electroporation methods can be used (e.g., Rose et al., 1990, Methods in Yeast Genetics, Cold Spring Harbor Laboratory Press, Cold Spring Harbor, N.Y.). Transformed cells can be isolated on selective media appropriate to the selectable marker used. Alternatively, or in addition, plates or filters lifted from plates can be scanned for GFP fluorescence to identify transformed clones.

[0270] For the introduction of vectors comprising differentially expressed sequences to certain types of cells, the method used can depend on the form of the vector. Plasmid vectors can be introduced by any of a number of transfection methods, including, for example, lipid-mediated transfection (“lipofection”), DEAE-dextran-mediated transfection, electroporation or calcium phosphate precipitation (see, e.g., Ausubel et al., 1988, Current Protocols in Molecular Biology, John Wiley & Sons, Inc., New York, N.Y.).

[0271] Lipofection reagents and methods suitable for transient transfection of a wide variety of transformed and non-transformed or primary cells are widely available, making lipofection an attractive method of introducing constructs to eukaryotic, and particularly mammalian cells in culture. Many companies offer kits and ways for this type of transfection.

[0272] The host cell can be capable of expressing the construct encoding the desired protein, processing the protein and transporting a secreted protein to the cell surface for secretion. Processing includes co- and post-translational modification such as leader peptide cleavage, GPI attachment, glycosylation, ubiquitination, and disulfide bond formation.

[0273] Cells/microorganisms can be transformed or transfected with the above-described expression vectors or polynucleotides coding for one or more enzymes as disclosed herein and cultured in nutrient media modified as appropriate for the specific cell/microorganism, inducing promoters, selecting transformants, or amplifying the genes encoding the desired sequences. In some cases, electroporation methods can be used to deliver an expression vector.

[0274] Expression of a vector (and the gene contained in the vector) can be verified by an expression assay, for example, qPCR, colony PCR, sequencing of a locus or whole genome sequencing, or by measuring levels of RNA. Expression level can be indicative also of copy number. For example, if expression levels are extremely high, this can indicate that more than one copy of a gene was integrated in a genome. Alternatively, high expression can indicate that a gene was integrated in a highly transcribed area, for example, near a highly expressed promoter. Expression can also be verified by measuring protein levels, such as through Western blotting.

[0275] CRISPR/Cas System

[0276] The methods disclosed throughout can involve pinpoint insertion of genes or the deletion of genes (or parts of genes). Methods described herein can use a CRISPR/Cas system. For example, double-strand breaks (DSBs) can be generated using a CRISPR/Cas system, e.g., a type II CRISPR/Cas system. A Cas enzyme used in the methods disclosed herein can be Cas9, which catalyzes DNA cleavage. Enzymatic action by Cas9 from Streptococcus pyogenes or any closely related Cas9 can generate double stranded breaks at target site sequences which hybridize to 20 nucleotides of a guide sequence and have a protospacer-adjacent motif (PAM) following the 20 nucleotides of the target sequence.

[0277] A vector can be operably linked to an enzyme-coding sequence encoding a CRISPR enzyme, such as a Cas protein and Mad7. Cas proteins that can be used include class 1 and class 2. Non-limiting examples of Cas proteins include Cas1, Cas1B Cas1, Cas1B, Cas2, Cas3, Cas4, Cas5, Cas5d, Cas5t, Cas5h, Cas5a, Cas6, Cas7, Cas8, Cas9 (also known as Csn1 or Csx12), Cas10, Csyl , Csy2, Csy3, Csy4, Cse1, Cse2, Cse3, Cse4, Cse5e, Csc1, Csc2, Csa5, Csn1, Csn2, Csm1, Csm2, Csm3, Csm4,

[0278] Csm5, Csm6, Cmr1, Cmr3, Cmr4, Cmr5, Cmr6, Csb1, Csb2, Csb3, Csx17, Csx14, Csx10, Csx16, CsaX, Csx3, Csx1, Csx1S, Csf1, Csf2, CsO, Csf4, Csd1, Csd2, Cst1, Cst2, Csh1, Csh2, Csa1, Csa2, Csa3, Csa4, Csa5, C2c1, C2c2, C2c3, Cpf1, CARF, DinG, homologues thereof, or modified versions thereof. An unmodified CRISPR enzyme can have DNA cleavage activity, such as Cas9. A CRISPR enzyme can direct cleavage of one or both strands at a target sequence, such as within a target sequence and/or within a complement of a target sequence. For example, a CRISPR enzyme can direct cleavage of one or both strands within 1, 2, 3, 4, 5, 6, 7, 8, 9, 10, 15, 20, 25, 30, 35, 40, 45, 50, 60, 70, 80, 90, 100, 125, 150, 175, 200, 300, 400, 500, or more base pairs from the first or last nucleotide of a target sequence. A vector that encodes a CRISPR enzyme that is mutated to with respect, to a corresponding wild-type enzyme such that the mutated CRISPR enzyme lacks the ability to cleave one or both strands of a target polynucleotide containing a target sequence can be used.

[0279] A vector that encodes a CRISPR enzyme comprising one or more nuclear localization sequences (NLSs) can be used. For example, there can be 1, 2, 3, 4, 5, 6, 7, 8, 9, 10 NLSs used. A CRISPR enzyme can comprise the NLSs at or near the ammo-terminus (e.g., 1, 2, 3, 4, 5, 6, 7, 8, 9, 10 NLSs), or at or near the carboxy-terminus (e.g., 1, 2, 3, 4, 5, 6, 7, 8, 9, 10 NLSs), or any combination of these (e.g., one or more NLS at the ammo-terminus and one or more NLS at the carboxy terminus). When more than one NLS is present, each can be selected independently of others, such that a single NLS can be present in more than one copy and/or in combination with one or more other NLSs present in one or more copies.

[0280] CRISPR enzymes used in the methods can comprise at most 6 NLSs. An NLS is considered near the N- or C-terminus when the nearest amino acid to the NLS is within 50 amino acids along a polypeptide chain from the N- or C-terminus, e.g., within 1, 2, 3, 4, 5, 10, 15, 20, 25, 30, 40, or 50 amino acids.

[0281] Guide RNA

[0282] As used herein, the term “guide RNA” and its grammatical equivalents refers to an RNA that can specifically target a DNA sequence and form a complex with Cas protein. An RNA/Cas complex can assist in “guiding” Cas protein to a target DNA.

[0283] A method disclosed herein also can comprise introducing into a cell or embryo at least one guide RNA or nucleic acid, e.g., DNA encoding at least one guide RNA. A guide RNA can interact with a RNA-guided endonuclease to direct the endonuclease to a specific target site, at which site the 5′ end of the guide RNA base pairs with a specific protospacer sequence in a chromosomal sequence.

[0284] A guide RNA can comprise two RNAs, e.g., CRISPR RNA (crRNA) and transactivating crRNA (tracrRNA). A guide RNA can sometimes comprise a single-chain RNA, or single guide RNA (sgRNA) formed by fusion of a portion (e.g., a functional portion) of crRNA and tracrRNA. A guide RNA can also be a dualRNA comprising a crRNA and a tracrRNA. Furthermore, a crRNA can hybridize with a target DNA.

[0285] As discussed above, a guide RNA can be an expression product. For example, a DNA that encodes a guide RNA can be a vector comprising a sequence coding for the guide RNA. A guide RNA can be transferred into a cell or microorganism by transfecting the cell or microorganism with an isolated guide RNA or plasmid DNA comprising a sequence coding for the guide RNA and a promoter. A guide RNA can also be transferred into a cell or microorganism in other ways, such as using virus-mediated gene delivery.

[0286] A guide RNA can be isolated. For example, a guide RNA can be transfected in the form of an isolated RNA into a cell or microorganism. A guide RNA can be prepared by in vitro transcription using any in vitro transcription system. A guide RNA can be transferred to a cell in the form of isolated RNA rather than in the form of plasmid comprising encoding sequence for a guide RNA.

[0287] A guide RNA can comprise three regions: a first region at the 5′ end that can be complementary to a target site in a chromosomal sequence, a second internal region that can form a stem loop structure, and a third 3′ region that can be single-stranded. A first region of each guide RNA can also be different such that each guide RNA guides a fusion protein to a specific target site. Further, second and third regions of each guide RNA can be identical in all guide RNAs.

[0288] A first region of a guide RNA can be complementary to sequence at a target site in a chromosomal sequence such that the first region of the guide RNA can base pair with the target site. In some cases, a first region of a guide RNA can comprise from 10 nucleotides to 25 nucleotides (i.e., from 10 nucleotides to 25 nucleotides; or 10 nucleotides to 25 nucleotides; or from 10 nucleotides to 25 nucleotides; or from 10 nucleotides to 25 nucleotides or more. For example, a region of base pairing between a first region of a guide RNA and a target site in a chromosomal sequence can be 10, 11, 12, 13, 14, 15, 16, 17, 18, 19, 20, 22, 23, 24, 25, or more nucleotides in length. Sometimes, a first region of a guide RNA can be 19, 20, or 21 nucleotides in length.

[0289] A guide RNA can also comprise a second region that forms a secondary structure. For example, a secondary structure formed by a guide RNA can comprise a stem (or hairpin) and a loop. A length of a loop and a stem can vary. For example, a loop can range from 3 to 10 nucleotides in length, and a stem can range from 6 to 20 base pairs in length. A stem can comprise one or more bulges of 1 to 10 nucleotides. The overall length of a second region can range from 16 to 60 nucleotides in length. For example, a loop can be 4 nucleotides in length and a stem can be 12 base pairs.

[0290] A guide RNA can also comprise a third region at the 3′ end that can be essentially single-stranded. For example, a third region is sometimes not complementary to any chromosomal sequence in a cell of interest and is sometimes not complementary to the rest of a guide RNA. Further, the length of a third region can vary. A third region can be more than 4 nucleotides in length. For example, the length of a third region can range from 5 to 60 nucleotides in length.

[0291] A guide RNA can be introduced into a cell or embryo as an RNA molecule. For example, a RNA molecule can be transcribed in vitro and/or can be chemically synthesized. An RNA can be transcribed from a synthetic DNA molecule, e.g., a gBlocks® gene fragment. A guide RNA can then be introduced into a cell or embryo as an RNA molecule. A guide RNA can also be introduced into a cell or embryo in the form of a non-RNA nucleic acid molecule, e.g., DNA molecule. For example, a DNA encoding a guide RNA can be operably linked to promoter control sequence for expression of the guide RNA in a cell or embryo of interest. A RNA coding sequence can be operably linked to a promoter sequence that is recognized by RNA polymerase III (Pol III). Plasmid vectors that can be used to express guide RNA include, but are not limited to, px330 vectors and px333 vectors. In some cases, a plasmid vector (e.g., px333 vector) can comprise two guide RNA-encoding DNA sequences.

[0292] A DNA sequence encoding a guide RNA can also be part of a vector. Further, a vector can comprise additional expression control sequences (e.g., enhancer sequences, Kozak sequences, polyadenylation sequences, transcriptional termination sequences, etc.), selectable marker sequences (e.g., antibiotic resistance genes), origins of replication, and the like. A DNA molecule encoding a guide RNA can also be linear. A DNA molecule encoding a guide RNA can also be circular.

[0293] When DNA sequences encoding an RNA-guided endonuclease and a guide RNA are introduced into a cell, each DNA sequence can be part of a separate molecule (e.g., one vector containing an RNA-guided endonuclease coding sequence and a second vector containing a guide RNA coding sequence) or both can be part of a same molecule (e.g., one vector containing coding (and regulatory) sequence for both an RNA-guided endonuclease and a guide RNA).

[0294] Site-Specific Insertion

[0295] Insertion of the genes can be site-specific. For example, one or more genes can be inserted adjacent to a promoter. Genes can also be inserted into a neutral location in a genome such as into a non-coding region or elsewhere such that wild-type gene function remains intact.

[0296] Modification of a targeted locus of a cell/microorganism can be produced by introducing DNA into cell/microorganisms, where the DNA has homology to the target locus. DNA can include a marker gene, allowing for selection of cells comprising the integrated construct. Homologous DNA in a target vector can recombine with DNA at a target locus. A marker gene can be flanked on both sides by homologous DNA sequences, a 3′ recombination arm, and a 5′ recombination arm.

[0297] A variety of enzymes can catalyze insertion of foreign DNA into a microorganism genome. For example, site-specific recombinases can be clustered into two protein families with distinct biochemical properties, namely tyrosine recombinases (in which DNA is covalently attached to a tyrosine residue) and serine recombinases (where covalent attachment occurs at a serine residue). In some cases, recombinases can comprise Cre, ΦC31 integrase (a serine recombinase derived from Streptomyces phage (13C31), or bacteriophage derived site-specific recombinases (including Flp, lambda integrase, bacteriophage HK022 recombinase, bacteriophage R4 integrase and phage TP901-1 integrase).

[0298] The CRISPR/Cas system can be used to perform site specific insertion. For example, a nick on an insertion site in the genome can be made by CRISPR/Cas to facilitate the insertion of a transgene at the insertion site.

[0299] The methods described herein, can utilize techniques that can be used to allow a DNA or RNA construct entry into a host cell include, but are not limited to, calcium phosphate/DNA coprecipitation, microinjection of DNA into a nucleus, electroporation, bacterial protoplast fusion with intact cells, transfection, lipofection, infection, particle bombardment, sperm mediated gene transfer, or any other technique.

[0300] Certain aspects disclosed herein can utilize vectors (including the ones described above). Any plasmids and vectors can be used as long as they are replicable and viable in a selected host microorganism. Vectors known in the art and those commercially available (and variants or derivatives thereof) can be engineered to include one or more recombination sites for use in the methods. Vectors that can be used include, but not limited to eukaryotic expression vectors such as pRS, pBluSkII, pET, pFastBac, pFastBacHT, pFastBacDUAL, pSFV, and pTet-Splice (Invitrogen), pEUK-C1, pPUR, pMAM, pMAMneo, pBI101, pBI121, pDR2, pCMVEBNA, and pYACneo (Clontech), pSVK3, pSVL, pMSG, pCH110, and pKK232-8 (Pharmacia, Inc.), pXT1, pSG5, pPbac, pMbac, pMClneo, and pOG44 (Stratagene, Inc.), and pYES2, pAC360, pBlueBa-cHis A, B, and C, pVL1392, pBlueBac111, pCDM8, pcDNA1, pZeoSV, pcDNA3, pREP4, pCEP4, and pEBVHis (Invitrogen, Corp.), and variants or derivatives thereof.

[0301] These vectors can be used to express a gene or portion of a gene of interest. A gene or portion of a gene can be inserted by using known methods, such as restriction enzyme or PCR-based techniques.

[0302] Fermentation

[0303] In some embodiments, the cells/microorganisms useful in the present invention should be cultured in fermentation conditions that are appropriate to convert a substrate to UDCA, cholic acid, and/or another UDCA precursor. Reaction conditions that should be considered include temperature, media flow rate, pH, media redox potential, agitation rate, inoculum level, maximum substrate concentrations, rates of introduction of the substrate to the bioreactor to ensure that substrate level does not become limiting, maximum product concentrations to avoid product inhibition, gas flow, gas composition, aeration rate, bio-reactor design, and media composition.

[0304] The optimum reaction conditions will depend partly on the particular cell/microorganism used. However, in some cases, it is preferred that the fermentation be performed at a pressure higher than ambient pressure.

[0305] The use of pressurized systems can greatly reduce the volume of the bioreactor required, and consequently the capital cost of the fermentation equipment. In some cases, reactor volume can be reduced in linear proportion to increases in reactor operating pressure, i.e. bioreactors operated at 10 atmospheres of pressure need only be one tenth the volume of those operated at 1 atmosphere of pressure.

[0306] Fermentation Conditions

[0307] In those embodiments in which the cell/microorganism is cultured in fermentation conditions, the pH of the culture media may be optimized based on the cell/microorganism used. For example, the pH used can range from 4 to 10. In other instances, the pH can be from 5 to 9; 6 to 8; 6.1 to 7.9; 6.2 to 7.8; 6.3 to 7.7; 6.4 to 7.6; 6.5 to 7.5; 6.6 to 7.4; or 5.5 to 7.5. For example, the pH can be from 6.6 to 7.4. In some cases, the pH can be from 5 to 9. In some cases, the pH can be from 6 to 8. In some cases, the pH can be from 6.1 to 7.9. In some cases, the pH can be from 6.2 to 7.8. In some cases, the pH can be from 6.3 to 7.7. In some cases, the pH can be from 6.4 to 7.6. In some cases, the pH can be from 6.5 to 7.5. In some instances the pH used for the fermentation can be greater than about 6. In some instances the pH used for the fermentation can be lower than about 10.

[0308] Temperature can also be adjusted based on the cell/microorganism used. For example, the temperature can range from 27° C. to 45° C.; 28° C. to 44° C.; 29° C. to 43° C.; 30° C. to 42° C.; 31° C. to 41° C.; 32° C. to 40° C.; or 36° C. to 39° C.

[0309] Availability of oxygen and other gases may affect yield and fermentation rate. For example, when considering oxygen availability, the percent of dissolved oxygen (DO) within the fermentation media can be from 1% to 40%. In certain instances, the DO concentration can be from 1.5% to 35%; 2% to 30%; 2.5% to 25%; 3% to 20%; 4% to 19%; 5% to 18%; 6% to 17%; 7% to 16%;

[0310] 8% to 15%; 9% to 14%; 10% to 13%; or 11% to 12%. For example, in some cases the DO concentration can be from 2% to 30%. In other cases, the DO can be from 3% to 20%. In some cases, the DO can be from 4% to 10%. In some cases, the DO can be from 1.5% to 35%. In some cases, the DO can be from 2.5% to 25%. In some cases, the DO can be from 4% to 19%. In some cases, the DO can be from 5% to 18%. In some cases, the DO can be from 6% to 17%. In some cases, the DO can be from 7% to 16%. In some cases, the DO can be from 8% to 15%. In some cases, the DO can be from 9% to 14%. In some cases, the DO can be from 10% to 13%. In some cases, the DO can be from 11% to 12%.

[0311] In some cases, atmospheric CO2 can help to control the pH within cell culture medium. pH contained within cell culture media is dependent on a balance of dissolved CO₂ and bicarbonate (HCO₃). Changes in atmospheric CO₂ can alter the pH of the medium. In certain instances, the atmospheric CO₂ can be from 0% to 10%; 0.01% to 9%; 0.05% to 8%; 0.1% to 7%; 0.5% to 6%; 1% to 5%; 2% to 4%; 3% to 6%; 4% to 7%; 2% to 6%; or 5% to 10%.

[0312] In cases where a switch is used, the media can comprise the molecule that induces or represses the switch.

[0313] When a lanthanum switch is used to repress the expression of one or more of the genes described herein, the media can comprise lanthanum, which will repress expression of the one or more genes under the control of the switch. In the case of lanthanum any one of the following concentrations can effectively repress expression of the one or more genes: 0.1 μM; 0.5 μM; 1 μM; 2 μM; 3 μM; 4 μM; 5 μM; 6 μM; 7 μM; 8 μM; 9 μM; 10 μM; 12.5 μM; 15 μM; 17.5 μM; 20 μM; 25 μM; 50 μM; 100 μM or more. In one case, 0.1 μM lanthanum can be used to repression expression of the one or more genes under the control of a lanthanum switch. In other cases, at least 0.5 μM lanthanum can be used. In other cases, at least 1 μM lanthanum can be used. In other cases, at least 2 μM lanthanum can be used. In other cases, at least 3 μM lanthanum can be used. In other cases, at least 4 μM lanthanum can be used. In other cases, at least 5 μM lanthanum can be used. In other cases, at least 6 μM lanthanum can be used. In other cases, at least 7 μM lanthanum can be used. In other cases, at least 8 μM lanthanum can be used. In other cases, at least 9 μM lanthanum can be used. In other cases, at least 10 μM lanthanum can be used. In other cases, at least 12.5 μM lanthanum can be used. In other cases, at least 15 μM lanthanum can be used. In other cases, at least 17.5 μM lanthanum can be used. In other cases, at least 20 μM lanthanum can be used. In other cases, at least 25 μM lanthanum can be used. In other cases, at least 50 μM lanthanum can be used. In other cases, at least 100 μM lanthanum can be used. In some cases, a range of 0.5 μM lanthanum to 100 μM lanthanum will effectively repress gene expression. In some cases, a range of 0.5 μM lanthanum to 50 μM lanthanum will repress gene expression. In other cases, a range of 1 μM lanthanum to 20 μM lanthanum will repress gene expression. In some cases, a range of 2 μM lanthanum to 15 μM lanthanum will repress gene expression. In some cases, a range of 3 μμM lanthanum to 12.5 μM lanthanum will repress gene expression. In some cases, a range of 4 μμM lanthanum to 12 μM lanthanum will repress gene expression. In some cases, a range of 5 μM lanthanum to 11.5 μM lanthanum will repress gene expression. In some cases, a range of 6 μμM lanthanum to 11 μM lanthanum will repress gene expression. In some cases, a range of 7 μM lanthanum to 10.5 μM lanthanum will repress gene expression. In some cases, a range of 8 μμM lanthanum to 10 μM lanthanum will repress gene expression.

[0314] In some cases, the lanthanum in the media can be diluted to turn on expression of the one or more lanthanum repressed genes. For example, in some cases, the dilution of lanthanum containing media can be 1:1 (1 part lanthanum containing media to 1 part non-lanthanum containing media). In some cases, the dilution can be at least 1:2; 1:3; 1:4; 1:5; 1:7.5; 1:10; 1:15; 1:20; 1:25; 1:30; 1:35; 1:40; 1:45; 1:50; 1:75; 1:100; 1:200; 1:300; 1:400; 1:500; 1:1,000; or 1:10,000. For example, in some cases, a 1:2 dilution can be used. In some cases, at least a 1:3 dilution can be used. In some cases, at least a 1:4 dilution can be used. In some cases, at least a 1:5 dilution can be used. In some cases, at least a 1:7.5 dilution can be used. In some cases, at least a 1:10 dilution can be used. In some cases, at least a 1:15 dilution can be used. In some cases, at least a 1:20 dilution can be used. In some cases, at least a 1:25 dilution can be used. In some cases, at least a 1:30 dilution can be used. In some cases, at least a 1:35 dilution can be used. In some cases, at least a 1:40 dilution can be used. In some cases, at least a 1:45 dilution can be used. In some cases, at least a 1:50 dilution can be used. In some cases, at least a 1:75 dilution can be used. In some cases, at least a 1:100 dilution can be used. In some cases, at least a 1:200 dilution can be used. In some cases, at least a 1:300 dilution can be used. In some cases, at least a 1:400 dilution can be used. In some cases, at least a 1:500 dilution can be used. In some cases, at least a 1:1,000 dilution can be used. In some cases, at least a 1:10,000 dilution can be used.

[0315] In some cases, the cell/microorganism may be grown in media comprising lanthanum. The media can then be diluted to effectively turn on the expression of the lanthanum repressed genes. The cell/microorganism can be then grown in conditions to promote the production of desired products, such as UDCA, cholic acid, and/or other UDCA precursors (as disclosed throughout).

[0316] When a glucose to galactose switch is used to repress the expression of one or more of the genes described herein (e.g., when a GAL1 or GAL10 promoter is used), the media can comprise glucose, which will repress expression of the one or more genes under the control of the switch. In the case of glucose any one of the following concentrations can effectively repress expression of the one or more genes: 0.1%; 0.5%; 1%; 2%; 3%; 4%; 5%; 6%; 7%; 8%; 9%; 10%; 12.5%; 15%; 17.5%; 20%; 25%; 50%; 100% or more. In one case, 0.1% glucose can be used to repression expression of the one or more genes under the control of a glucose to galactose switch. In other cases, at least 0.5% glucose can be used. In other cases, at least 1% glucose can be used. In other cases, at least 2% glucose can be used. In other cases, at least 3% glucose can be used. In other cases, at least 4% glucose can be used. In other cases, at least 5% glucose can be used. In other cases, at least 6% glucose can be used. In other cases, at least 7% glucose can be used. In other cases, at least 8% glucose can be used. In other cases, at least 9% glucose can be used. In other cases, at least 10% glucose can be used. In other cases, at least 12.5% glucose can be used. In other cases, at least 15% glucose can be used. In other cases, at least 17.5% glucose can be used. In other cases, at least 20% glucose can be used. In other cases, at least 25% glucose can be used. In other cases, at least 50% glucose can be used. In other cases, at least 100% glucose can be used. In some cases, a range of 0.5% glucose to 100% glucose will effectively repress gene expression. In some cases, a range of 0.5% glucose to 50% glucose will repress gene expression. In other cases, a range of 1% glucose to 20% glucose will repress gene expression. In some cases, a range of 2% glucose to 15% glucose will repress gene expression. In some cases, a range of 3% glucose to 12.5% glucose will repress gene expression. In some cases, a range of 4% glucose to 12% glucose will repress gene expression. In some cases, a range of 5% glucose to 11.5% glucose will repress gene expression. In some cases, a range of 6% glucose to 11% glucose will repress gene expression. In some cases, a range of 7% glucose to 10.5% glucose will repress gene expression. In some cases, a range of 8% glucose to 10% glucose will repress gene expression.

[0317] In some cases, the glucose in the media can be diluted to turn on expression of the one or more glucose repressed genes. For example, in some cases, the dilution of glucose containing media can be 1:1 (1 part glucose containing media to 1 part non-glucose containing media). In some cases, the dilution can be at least 1:2; 1:3; 1:4; 1:5; 1:7.5; 1:10; 1:15; 1:20; 1:25; 1:30; 1:35; 1:40; 1:45; 1:50; 1:75; 1:100; 1:200; 1:300; 1:400; 1:500; 1:1,000; or 1:10,000. For example, in some cases, a 1:2 dilution can be used. In some cases, at least a 1:3 dilution can be used. In some cases, at least a 1:4 dilution can be used. In some cases, at least a 1:5 dilution can be used. In some cases, at least a 1:7.5 dilution can be used. In some cases, at least a 1:10 dilution can be used. In some cases, at least a 1:15 dilution can be used. In some cases, at least a 1:20 dilution can be used. In some cases, at least a 1:25 dilution can be used. In some cases, at least a 1:30 dilution can be used. In some cases, at least a 1:35 dilution can be used. In some cases, at least a 1:40 dilution can be used. In some cases, at least a 1:45 dilution can be used. In some cases, at least a 1:50 dilution can be used. In some cases, at least a 1:75 dilution can be used. In some cases, at least a 1:100 dilution can be used. In some cases, at least a 1:200 dilution can be used. In some cases, at least a 1:300 dilution can be used. In some cases, at least a 1:400 dilution can be used. In some cases, at least a 1:500 dilution can be used. In some cases, at least a 1:1,000 dilution can be used. In some cases, at least a 1:10,000 dilution can be used.

[0318] In cases where a switch is used, the media can comprise the molecule that de-represses the switch. For example, when a glucose to galactose switch is used to repress the expression of one or more of the genes described herein (e.g., when a GAL1 or GAL10 promoter is used), the media can comprise raffinose, which will de-repress expression of the one or more genes under the control of the switch. In the case of raffinose any one of the following concentrations can effectively repress expression of the one or more genes: 0.1%; 0.5%; 1%; 2%; 3%; 4%; 5%; 6%; 7%; 8%; %; 10%; 12.5%; 15%; 17.5%; 20%; 25%; 50%; 100% or more. In one case, 0.1% raffinose can be used to de-repress expression of the one or more genes under the control of a raffinose switch. In other cases, at least 0.5% raffinose can be used. In other cases, at least 1% raffinose can be used. In other cases, at least 2% raffinose can be used. In other cases, at least 3% raffinose can be used. In other cases, at least 4% raffinose can be used. In other cases, at least 5% raffinose can be used. In other cases, at least 6% raffinose can be used. In other cases, at least 7% raffinose can be used. In other cases, at least 8% raffinose can be used. In other cases, at least 9% raffinose can be used. In other cases, at least 10% raffinose can be used. In other cases, at least 12.5% raffinose can be used. In other cases, at least 15% raffinose can be used. In other cases, at least 17.5% raffinose can be used. In other cases, at least 20% raffinose can be used. In other cases, at least 25% raffinose can be used. In other cases, at least 50% raffinose can be used. In other cases, at least 100% raffinose can be used. In some cases, a range of 0.5% raffinose to 100% raffinose will effectively repress gene expression. In some cases, a range of 0.5% raffinose to 50% raffinose will de-repress gene expression. In other cases, a range of 1% raffinose to 20% raffinose will repress gene expression. In some cases, a range of 2% raffinose to 15% raffinose will repress gene expression. In some cases, a range of 3% raffinose to 12.5% raffinose will de-repress gene expression. In some cases, a range of 4% raffinose to 12% raffinose will de-repress gene expression. In some cases, a range of 5% raffinose to 11.5% raffinose will de-repress gene expression. In some cases, a range of 6% raffinose to 11% raffinose will de-repress gene expression. In some cases, a range of 7% raffinose to 10.5% raffinose will de-repress gene expression. In some cases, a range of 8% raffinose to 10% raffinose will de-repress gene expression.

[0319] In cases where a switch is used, the media can comprise the molecule that induces the switch. For example, when a glucose to galactose switch is used to induce the expression of one or more of the genes (e.g., when a GAL1 or GAL10 promoter is used), the media can comprise galactose, which will induce expression of the one or more genes under the control of the switch. In the case of galactose any one of the following concentrations can effectively induce expression of the one or more genes: 0.1%; 0.5%; 1%; 2%; 3%; 4%; 5%; 6%; 7%; 8%; 9%; 10%; 12.5%; 15%; 17.5%; 20%; 25%; 50%; 100% or more. In one case, 0.1% galactose can be used to induce expression of the one or more genes under the control of a glucose to galactose switch. In other cases, at least 0.5% galactose can be used. In other cases, at least 1% galactose can be used. In other cases, at least 2% galactose can be used. In other cases, at least 3% galactose can be used. In other cases, at least 4% galactose can be used. In other cases, at least 5% galactose can be used. In other cases, at least 6% galactose can be used. In other cases, at least 7% galactose can be used. In other cases, at least 8% galactose can be used. In other cases, at least 9% galactose can be used. In other cases, at least 10% galactose can be used. In other cases, at least 12.5% galactose can be used. In other cases, at least 15% galactose can be used. In other cases, at least 17.5% galactose can be used. In other cases, at least 20% galactose can be used. In other cases, at least 25% galactose can be used. In other cases, at least 50% galactose can be used. In other cases, at least 100% galactose can be used. In some cases, a range of 0.5% galactose to 100% galactose will effectively induce gene expression. In some cases, a range of 0.5% galactose to 50% galactose will induce gene expression. In other cases, a range of 1% galactose to 20% galactose will induce gene expression. In some cases, a range of 2% galactose to 15% galactose will induce gene expression. In some cases, a range of 3% galactose to 12.5% galactose will induce gene expression. In some cases, a range of 4% galactose to 12% galactose will induce gene expression. In some cases, a range of 5% galactose to 11.5% galactose will induce gene expression. In some cases, a range of 6% galactose to 11% galactose will induce gene expression. In some cases, a range of 7% galactose to 10.5% galactose will induce gene expression. In some cases, a range of 8% galactose to 10% galactose will induce gene expression.

[0320] When a copper switch is used to induce the expression of one or more of the genes described herein, the media can comprise copper, which will induce expression of the one or more genes under the control of the switch. In the case of copper any one of the following concentrations can effectively induce expression of the one or more genes: 1 μM; 2.5 μM; 5 μM; 10 μM; 25 μM; 50 μM; 75 μM; 100 μM; 150 μM; 200 μM; 300 μM; 400 μM; 500 μM; 600 μM; 700 μM; 800 μM; 900 μM; 1 M; 10 mM or more. In one case, 1 μM copper can be used to induce expression of the one or more genes under the control of a copper promoter. In other cases, at least 5 μμM copper can be used. In other cases, at least 10 04 copper can be used. In other cases, at least 25 μMcopper can be used. In other cases, at least 50 μM copper can be used. In other cases, at least 100 μM copper can be used. In other cases, at least 200 μM copper can be used. In other cases, at least 300 μM copper can be used. In other cases, at least 400 μM copper can be used. In other cases, at least 500 μM copper can be used. In other cases, at least 600 μM copper can be used. In other cases, at least 700 μM copper can be used. In other cases, at least 800 μM copper can be used. In other cases, at least 900 μM copper can be used. In other cases, at least 1 mM copper can be used. In other cases, at least 2.5 mM copper can be used. In other cases, at least 5 mM copper can be used. In other cases, at least 7.5 mM copper can be used. In other cases, at least 10 mM copper can be used. In some cases, a range of 1 μM copper to 10 mM copper will effectively repress gene expression. In some cases, a range of 2.5 μM copper to 1 mM copper will repress gene expression. In other cases, a range of 5 μM copper to 800 μM copper will repress gene expression. In some cases, a range of 10 μM copper to 600 μM copper will repress gene expression. In some cases, a range of 25 μM copper to 500 μM copper will repress gene expression. In some cases, a range of 50 μM copper to 450 μM copper will repress gene expression. In some cases, a range of 75 μM copper to 400 μM copper will repress gene expression. In some cases, a range of 100 μM copper to 350 μM copper will repress gene expression. In some cases, a range of 150 μμM copper to 300 μM copper will repress gene expression. In some cases, a range of 200 μM copper to 250 μM copper will repress gene expression.

[0321] Bioreactor

[0322] Fermentation reactions can be carried out in any suitable bioreactor. In some cases, the bioreactor can comprise a first, growth reactor in which the cells/microorganisms are cultured, and a second, fermentation reactor, to which broth from the growth reactor is fed and in which most of the fermentation product is produced.

[0323] Product Recovery

[0324] The fermentation of the cells/microorganisms disclosed herein can produce a broth comprising a desired product (e.g., UDCA, cholic acid, and/or other UDCA precursor), one or more by-products, and/or the cell/microorganism itself.

[0325] In certain methods of producing products, the concentration of products in the fermentation broth is at least 0.1 g/L. For example, the concentration of products produced in the fermentation broth can be from 0.1 g/L to 0.5 g/L, 0.5 g/L to 1 g/L, 1 g/L to 5 g/L, 2 g/L to 6 g/L, 3 g/L to 7 g/L, 4 g/L to 8 g/L, 5 g/L to 9 g/L, or 6 g/L to 10 g/L. In some cases, the concentration of products can be at least 9 g/L. In some cases, the concentration of products can be from 0.1 g/L to 10 g/L. In some cases, the concentration of products can be from 0.5 g/L to 3 g/L. In some cases, the concentration of products can be from 1 g/L to 5 g/L. In some cases, the concentration of products can be from 2 g/L to 6 g/L. In some cases, the concentration of products can be from 3 g/L to 7 g/L. In some cases, the concentration of products can be from 4 g/L to 8 g/L. In some cases, the concentration of products can be from 5 g/L to 9 g/L. In some cases, the concentration of products can be from 6 g/L to 10 g/L. In some cases, the concentration of products can be from 1 g/L to 3 g/L. In some cases, the concentration of products can be about 2 g/L.

[0326] As discussed above, in certain cases the product produced in the fermentation reaction is converted to a different organic product. For example, the product produced may be a UDCA precursor that serves as a substrate for the further production of UDCA, cholic acid, or another UDCA precursor. In other cases, the product is first recovered from the fermentation broth before conversion to a different organic product.

[0327] In some cases, the product can be continuously removed from a portion of broth and recovered as purified. In particular cases, the recovery of the product includes passing the removed portion of the broth containing the product through a separation unit to separate the cells/microorganisms from the broth, to produce a cell-free product permeate, and returning the microorganisms to the bioreactor. The cell-free product containing permeate can then can be stored or be used for subsequent conversion to a different desired product.

[0328] The recovering of the desired product and/or one or more other products or by-products produced in the fermentation reaction can comprise continuously removing a portion of the broth and recovering separately the product and one or more other products from the removed portion of the broth. In some cases, the recovery of the product and/or one or more other products includes passing the removed portion of the broth containing the product and/or one or more other products through a separation unit to separate cells/microorganisms from the product and/or one or more other products, to produce a cell-free product and one or more other product-containing permeate, and returning the microorganisms to the bioreactor.

[0329] In the above cases, the recovery of the product and one or more other products can include first removing the product from the cell-free permeate followed by removing the one or more other products from the cell-free permeate. The cell-free permeate can also then returned to the bioreactor.

[0330] The product, or a mixed product stream containing the product, can be recovered from the fermentation broth. For example, methods that can be used can include but are not limited to, fractional distillation or evaporation, pervaporation, and extractive fermentation. Further examples include: recovery using steam from whole fermentation broths; reverse osmosis combined with distillation; liquid-liquid extraction techniques involving solvent extraction of the product; aqueous two-phase extraction of the product in PEG/dextran system; solvent extraction using alcohols or esters, e.g., ethyl acetate, tributylphosphate, diethyl ether, n-butanol, dodecanol, oleyl alcohol, and an ethanol/phosphate system; aqueous two-phase systems composed of hydrophilic solvents and inorganic salts. See generally, Voloch, M., et al., (1985) and U.S. Pat. Pub. Appl. No. 2012/0045807.

[0331] In some cases, the product and/or other by-products may be recovered from the fermentation broth by continuously removing a portion of the broth from the bioreactor, separating microbial cells from the broth (conveniently by filtration, for example), and recovering the product and others such as alcohols and acids from the broth. Alcohols can conveniently be recovered for example by distillation, and acids can be recovered for example by adsorption on activated charcoal. The separated microbial cells are returned to the fermentation bioreactor. The cell-free permeate remaining after the alcohol(s) and acid(s) have been removed is also preferably returned to the fermentation bioreactor. Additional nutrients can be added to the cell-free permeate to replenish the nutrient medium before it is returned to the bioreactor.

[0332] Also, if the pH of the broth is adjusted during recovery of the product and/or by-products, the pH should be re-adjusted to a similar pH to that of the broth in the fermentation bioreactor, before being returned to the bioreactor.

[0333] In Vitro Methods and Steps

[0334] In some embodiments, the present invention relates in part to an in vitro method of making UDCA or UDCA precursor. In other words, in these embodiments, the method does not involve the use of a microorganism. For example, the substrate may be contacted with an enzyme or a fragment thereof, such as described previously, in a medium.

[0335] In some embodiments, the method involves both in vivo and in vitro steps. For example, some reactions along the biosynthetic pathway can occur within a cell, whereas some of the reactions along the pathway occur outside of a cell. In certain such methods, a UDCA precursor may be secreted by a cell into media and then directly converted enzymatically or non-enzymatically (e.g., chemically) into a different product, such as UDCA or another DCA precursor.

[0336] CoEnyme A

[0337] The microorganism and methods described throughout can be used to produce a CoA-form of the products described throughout. In some cases, a CoA ligase can be used to produce a CoA form of any of the products described throughout.

[0338] In some cases, SLC27A5 can produce a CoA product that is (25R)-3α,7α-dihydroxy-5β-cholestanoyl-CoA or (25R)-3α,7α,12α-trihydroxy-5β-cholestanoyl-CoA. In some cases, AMACR can produce a CoA product that is (25S)-3α,7α-dihydroxy-5β-cholestanoyl-CoA or (25S)-3α,7α,12α-trihydroxy-5β-cholestanoyl-CoA. In some cases, ACOX2 can produce a CoA product that is (24E)-3α,7α-dihydroxy-5β-cholest-24-enoyl-CoA or (24E)-3α,7α,12α-trihydroxy-5β-cholest-24-enoyl-CoA. In some cases, HSD17B4 can produce a CoA product that is 3α,7α-dihydroxy-24-oxo-5β-cholestanoyl-CoA or 3α,7α,12α-trihydroxy-24-oxo-5β-cholestanoyl-CoA. In some cases, SCP2/Thiolase can produce a CoA product that is 3α,7α-dihydroxy-5β-cholan-24-oyl-CoA (CDC-CoA) or 3α,7α,12α-trihydroxy-5β-cholan-24-oyl-CoA. In some cases, 7α-HSD can produce a CoA product that is 3α-hydroxy-7-oxo-5β-cholan-24-oyl-CoA. In some cases, 7β-HSD can produce a CoA product that is 3α,7β-dihydroxy-5β-cholan-24-oyl-CoA (UDC-CoA).

[0339] In some cases, the CoA form of one or more of the products can be (25R)-3α,7α-dihydroxy-5β-cholestanoyl-CoA; (25R)-3α,7α,12α-trihydroxy-5β-cholestanoyl-CoA; (25S)-3α,7α-dihydroxy-5β-cholestanoyl-CoA; (25S)-3α,7α,12α-trihydroxy-5β-cholestanoyl-CoA; (24E)-3α,7α-dihydroxy-5β-cholest-24-enoyl-CoA; (24E)-3α,7α,12α-trihydroxy-5β-cholest-24-enoyl-CoA; 3α,7α-dihydroxy-24-oxo-5β-cholestanoyl-CoA; 3α,7α,12α-trihydroxy-24-oxo-5β-cholestanoyl-CoA; 3α,7α-dihydroxy-5β-cholan-24-oyl-CoA (CDC-CoA); 3α,7α,12α-trihydroxy-5β-cholan-24-oyl-CoA; 3α-hydroxy-7-oxo-5β-cholan-24-oyl-CoA; 3α,7β-dihydroxy-5β-cholan-24-oyl-CoA (UDC-CoA); or any combination thereof.

[0340] The products as disclosed throughout can be isolated in their CoA form.

[0341] Free Acids

[0342] The microorganism and methods described throughout can be used to produce a free acid-form of the products described throughout. In some cases, a hydrolase can be used to produce a free acid form of any of the products described throughout.

[0343] In some cases, CYP27A1 can produce a free acid product that is (25R)-3α,7α-dihydroxy-5β-cholestanoic acid or (25R)-3α,7α,12α-trihydroxy-5β-cholestan-26-oic acid. In some cases, SLC27A5 can produce a free acid product that is (25R)-3α,7α-dihydroxy-5β-cholestanoic acid or (25R)-3α,7α,12α-trihydroxy-5β-cholestan-26-oic acid. In some cases, AMACR can produce a free acid product that is (25S)-3α,7α-dihydroxy-5β-cholestanoic acid or (25S)-3α,7α,12α-trihydroxy-5β-cholestanoic acid. In some cases, ACOX2 can produce a free acid product that is (24E)-3α,7α-dihydroxy-5β-cholest-24-enoic acid or (24E)-3α,7α,12α-trihydroxy-5β-cholest-24-enoic acid. In some cases, HSD17B4 can produce a free acid product that is 3α,7α-dihydroxy-24-oxo-5β-cholestanoic acid or 3α,7α,12α-trihydroxy-24-oxo-5β-cholestanoic acid. In some cases, SCP2/Thiolase can produce a free acid product that is 3α,7α-dihydroxy-5β-cholanoic acid (chenodeoxycholic acid; CDCA) or 3α,7α,12α-trihydroxy-5β-cholan-24-oic acid (cholic acid). In some cases, 7α-HSD can produce a free acid product that is 3α-hydroxy-7-oxo-5β-cholanoic acid (nutriacholic acid; NCA). In some cases, 7β-HSD can produce a free acid product that is 3α,7β-dihydroxy-5β-cholanoic acid (ursodeoxycholic acid; UDCA). In some cases, Choloyl-CoA hydrolase can produce a free acid product that is UDCA or 3α,7α,12α-trihydroxy-5β-cholan-24-oic acid (cholic acid).

[0344] In some cases, the free acid form of one or more of the products can be (25R)-3α,7α-dihydroxy-5β-cholestanoic acid; (25R)-3α,7α,12α-trihydroxy-5β-cholestan-26-oic acid; (25R)-3α,7α-dihydroxy-5β-cholestanoic acid; (25R)-3α,7α,12α-trihydroxy-5β-cholestan-26-oic acid; (25S)-3α,7α-dihydroxy-5β-cholestanoic acid; (25S)-3α,7α,12α-trihydroxy-5β-cholestanoic acid; (24E)-3α,7α-dihydroxy-5β-cholest-24-enoic acid; (24E)-3α,7α,12α-trihydroxy-5β-cholest-24-enoic acid; 3α,7α-dihydroxy-24-oxo-5β-cholestanoic acid; 3α,7α,12α-trihydroxy-24-oxo-5β-cholestanoic acid; 3α,7α-dihydroxy-5β-cholanoic acid (chenodeoxycholic acid; CDCA); 3α,7α,12α-trihydroxy-5β-cholan-24-oic acid (cholic acid); 3α-hydroxy-7-oxo-5β-cholanoic acid (nutriacholic acid; NCA); 3α,7β-dihydroxy-5β-cholanoic acid (ursodeoxycholic acid; UDCA); 3α,7α,12α-trihydroxy-5β-cholan-24-oic acid (cholic acid); or any combination thereof.

[0345] The products as disclosed throughout can be isolated in their free acid form.

[0346] Compositions

[0347] The present invention also relates in part to a composition comprising UDCA or UDCA precursor, a free acid or CoA thereof, or a pharmaceutically-acceptable derivative or prodrug thereof. The composition may further comprise an excipient. The composition may be in the form of a medicament. A “pharmaceutically acceptable derivative” means any pharmaceutically acceptable salt, ester, salt of an ester, pro-drug or other derivative thereof. Pharmaceutically acceptable salts of the compounds of this invention include those derived from pharmaceutically acceptable inorganic and organic acids and bases. Examples of suitable acid salts include acetate, adipate, benzoate, benzenesulfonate, butyrate, citrate, digluconate, dodecylsulfate, formate, fumarate, glycolate, hemisulfate, heptanoate, hexanoate, hydrochloride, hydrobromide, hydroiodide, lactate, maleate, malonate, methanesulfonate, 2-naphthalenesulfonate, nicotinate, nitrate, palmoate, phosphate, picrate, pivalate, propionate, salicylate, succinate, sulfate, tartrate, tosylate and undecanoate. Salts derived from appropriate bases include alkali metal (e.g., sodium), alkaline earth metal (e.g., magnesium), ammonium and N-(alkyl)₄⁺ salts.

[0348] The present invention also relates in part to a method of formulating the UDCA or UDCA precursor into a pharmaceutical composition.

[0349] For preparing pharmaceutical compositions from the compounds of the present invention, pharmaceutically-acceptable carriers include either solid or liquid carriers. Solid form preparations include powders, tablets, pills, capsules, cachets, suppositories, and dispersible granules. A solid carrier can be one or more substances, which also acts as diluents, flavoring agents, binders, preservatives, tablet disintegrating agents, or an encapsulating material. Details on techniques for formulation and administration are well described in the scientific and patent literature, see, e.g., the latest edition of Remington's Pharmaceutical Sciences, Maack Publishing Co, Easton Pa.

[0350] In powders, the carrier is a finely divided solid, which is in a mixture with the finely divided active component. In tablets, the active component is mixed with the carrier having the necessary binding properties in suitable proportions and compacted in the shape and size desired.

[0351] Suitable solid excipients are carbohydrate or protein fillers include, but are not limited to sugars, including lactose, sucrose, mannitol, or sorbitol; starch from corn, wheat, rice, potato, or other plants; cellulose such as methyl cellulose, hydroxypropylmethyl-cellulose, or sodium carboxymethylcellulose; and gums including arabic and tragacanth; as well as proteins such as gelatin and collagen. If desired, disintegrating or solubilizing agents are added, such as the cross-linked polyvinyl pyrrolidone, agar, alginic acid, or a salt thereof, such as sodium alginate.

[0352] Liquid form preparations include solutions, suspensions, and emulsions, for example, water or water/propylene glycol solutions. For parenteral injection, liquid preparations can be formulated in solution in aqueous polyethylene glycol solution.

[0353] The pharmaceutical preparation can be a unit dosage form. In such form the preparation is subdivided into unit doses containing appropriate quantities of the active component. The unit dosage form can be a packaged preparation, the package containing discrete quantities of preparation, such as packeted tablets, capsules, and powders in vials or ampoules. Also, the unit dosage form can be a capsule, tablet, cachet, or lozenge itself, or it can be the appropriate number of any of these in packaged form.

[0354] The present invention also relates to a method of making the pharmaceutical composition. In some cases, UDCA or a UDCA precursor is mixed with an excipient to produce a pharmaceutical composition.

[0355] Treatment of Disease and Symptoms of Disease

[0356] The UDCA or UDCA precursors (or other free acids or CoA products as disclosed throughout) can be used to treat disease. This includes treating one or more symptoms of the diseases. For example, the UDCA or a UDCA precursor (or other free acids or CoA products as disclosed throughout) can be used to treat one of more of the following diseases: gallstones (e.g., cholesterol gallstones), primary biliary cirrhosis, cystic fibrosis, impaired bile flow, intrahepatic cholestasis of pregnancy, and/or cholelithiasis.

[0357] Some of the diseases or symptom of disease can be exclusive to humans, but other diseases or symptom of disease can be shared in more than one animal, such as in all mammals.

[0358] The present invention relates in part to a method of treating a disease or symptom of a disease, the method comprising administering UDCA or UDCA precursor, a free acid or CoA thereof, or a pharmaceutically-acceptable derivative or prodrug thereof, to a subject in need of such treatment.

[0359] Suitable routes of administration include, but are not limited to, oral, intravenous, rectal, aerosol, parenteral, ophthalmic, pulmonary, transmucosal, transdermal, vaginal, otic, nasal, and topical administration. In addition, by way of example only, parenteral delivery includes intramuscular, subcutaneous, intravenous, intramedullary injections, as well as intrathecal, direct intraventricular, intraperitoneal, intralymphatic, and intranasal injections.

[0360] Use of UDCA or UDCA precursor

[0361] The present invention further relates in part to the use of the UDCA or UDCA precursor made using the aforementioned method in the manufacture of a medicament for the treatment or a disease or symptom of a disease. The disease or symptom of a disease may be any disease or symptom capable of being treated by UDCA or the UDCA precursor. Examples of such include gallstones, primary biliary cirrhosis, cystic fibrosis, impaired bile flow, intrahepatic cholestasis of pregnancy, and cholelithiasis.

[0362] UDCA can be used to treat gallstones and is a byproduct of intestinal bacteria.

[0363] The UDCA precursors may be used to make other products, such as other UDCA precursors or UDCA.

### EXAMPLES

[0364] While some cases have been shown and described herein, such cases are provided by way of example only. Numerous variations, changes, and substitutions will now occur to those skilled in the art without departing from the invention. It should be understood that various alternatives to the cases of the invention described herein will be employed in practicing the invention.

### Example 1—Identification of Enzymes that Convert Sugar to UDCA and Generating Strains that can Make UDCA

[0365] Thirteen heterologous enzymes (from the perspective of a Saccharomyces cerevisiae) were identified as possible enzymes that could be used to make UDCA from cholesterol. See e.g., FIG. 1. Two (2) additional enzymes were also identified as possible enzymes that could be used to convert sugar to cholesterol. See e.g., FIG. 2.

[0366] Genes encoding these enzymes were synthesized and then cloned into either yeast expression plasmids or into integration constructs. These plasmids or integrations constructs were subsequently transformed into Saccharomyces cerevisiae using standard yeast chemical transformation protocol, utilizing Lithium Acetate and PEG (3350). The transformed yeast were grown to mid log phase, then centrifuged at 4000 rpm with the supernatant removed. Pellets were washed with water and centrifuged again. The resulting pellet was resuspended in master mix containing 100 mM Lithium Acetate, 40% PEG (MW 3,350), 0.35 mg/ml carrier DNA (sheared salmon sperm DNA), and 50 to 500 ng of DNA to be transformed. The cell suspension was then incubated at 30° C. for 30 minutes, followed by at 45 minute heat shock at 42° C. At this point, nutritional selection was plated, while antifungal selection underwent a 4 hr to overnight recovery in rich yeast media before plating on agar containing the antifungal drug. Plates were then incubated at 30° C. for 2 to 3 days. After colonies were formed, proper integrations were verified by colony PCR before using strain in experiments.

[0367] Table 1 shows representative genes that were expressed in the yeast strains and the genetic origin of the enzymes that exhibited the best activity. Genes from other sources were also found to be active, but are not represented on Table 1.

TABLE 1

| Gene/enzyme | SEQ ID NO(s). | Source of Variants |
|---|---|---|
| ADR | 239 | Bovine |
| ADX | 241, 243, 245, 247, | Bovine, Zebrafish, |
| | 249, 251, 253, 255, | human |
| | 257, 259, 261 | |
| DHCR7 | 1 | Arabidopsis |
| DHCR24 | 21, 23, 25, 27, 45, 47 | Human, Bovine, |
| | | Zebrafish |
| CYP7A1 | 53, 65, 67, 69, 71, 73, | Mouse |
| | 75, 77, 79 | |
| HSD3B7 | 81 | Human |
| AKR1D1 | 91 | Mouse |
| AKR1C4 | 101 | Macaca fuscata |
| CYP27A1 | 125, 129, 131 | Rat, Mouse, Bovine |
| SLC27A5 | 139 | Human |
| AMACR | 145, 147 | Rat, Human |
| ACOX2 | 159, 165 | Human, Rabbit |
| HSD17B4 | 179, 183, 189 | Rat, Bovine, Xenopus |
| SCP2 | 203 | Yeast (POT1) |
| 7alpha- | 207, 211 | Escherichia coli, |
| hydroxysteroid | | Bacteroides |
| dehydrogenase | | fragilis |
| 7beta- | 221 | Clostridium |
| hydroxysteroid | | sardiniense |
| dehydrogenase | | |
| (NADP+) | | |

### Example 2—Yeast Strains having the Ability to Produce Cholesterol

[0368] Saccharomyces cerevisiae, which does not have the ability to naturally produce cholesterol, were genetically modified to upregulate the mevalonate pathway by overexpressing S. cerevisiae tHMG1 driven by a pGAL1 promoter. Additionally, S. cerevisiae were also genetically modified to express two heterologous genes, DHCR7 and DHCR24 driven by a GAL1 or GAL10 promoter.

[0369] All strains expressed the same DCHR7 from A. thaliana.

[0370] These different strains were tested for their ability to produce sterol compounds using GC/MS. As shown in FIG. 5, yeast strains expressing a DHCR24, were capable of making cholesterol, where DHCR24 from Homo sapiens and Danio rerio (zebrafish) had the best activity. The yeast strains that did not have a DHCR24 gene, did not produce any cholesterol.

### Example 3—Converting Cholesterol to 7-alpha-hydrogcholesterol

[0371] S. cerevisiae expressing A. thaliana DHCR7 and H. sapiens DHCR24 were transformed with several variants of cytochrome p450 family 7 subfamily A member 1 (CYP7A1) in combination with different adrenodoxin (ADX) variants. All strains expressed Bos taurus adrenodoxin reductases (ADRs).

[0372] The strains were then tested for their ability to convert cholesterol to 7-alpha-hydroxycholesterol, by its ability to hydroxylate the C7 carbon in cholesterol molecules. This conversion was detected by GC/MS.

[0373] As shown in FIG. 6, CYP7A1 from Mus musculus exhibited the best activity. Activity was also seen in CYP7A1 from Homo sapiens, Rattus norvegicus, Ogctolagus cuniculus, Bos taurus, and Danio rerio.

### Example 4—Converting 7-alpha-hydroxycholesterol to 7α-hydroxy-4-cholesten-3-one

[0374] Strains expressing A. thaliana DHCR7 and H. sapiens DHCR24 were genetically engineered to further express M. musculus CYP7A1, ADX from B. taurus and D. rerio, B. taurus adrenodoxin reductase (ADR), and 3 beta-hydroxysteroid dehydrogenase type 7 (HSD3B7).

[0375] The strains were then tested by GC/MS for their ability to convert 7-alpha-hydroxycholesterol to 7α-hydroxy-4-cholesten-3-one.

[0376] As shown in FIG. 7, HSD3B7 from Homo sapiens exhibited the best activity. Activity was also seen in HSD3B7 from Mus musculus and Danio rerio.

### Example 5—Converting 7α-hydroxy-4-cholesten-3-one to 7α-hydroxy-5β-cholestan-3-one

[0377] Strains expressing A. thaliana DHCR7 and H. sapiens DHCR24 were genetically engineered to further express M. musculus CYP7A1, ADX from D. rerio and B. taurus, B. taurus ADR, H. sapiens HSD3B7, and aldo-keto reductase family 1 member D1 (AKR1D1).

[0378] The strains were then tested by GC/MS for their ability to convert 7α-hydroxy-4-cholesten-3-one to 7α-hydroxy-5β-cholestan-3-one.

[0379] As shown in FIG. 8, AKR1D1 from Homo sapiens and Mus musculus exhibited the best activity.

### Example 6—Converting 7α-hydroxy-5β-cholestan-3-one to 5β-cholestane-3α,7α-diol

[0380] Strains expressing A. thaliana DHCR7 and H. sapiens DHCR24 were genetically engineered to further express M. musculus CYP7A1, ADX from D. rerio and B. taurus, B. taurus ADR, H. sapiens HSD3B7, M. musculus AKR1D1, and aldo-keto reductase family 1 member C9 (AKR1C9) or aldo-keto reductase family 1 member C4 (AKR1C4).

[0381] The strains were then tested by GC/MS for their ability to convert 7α-hydroxy-5β-cholestan-3-one to 5β-cholestane-3α,7α-diol.

[0382] As shown in FIG. 9, AKR1C4 from Macaca fuscata exhibited the best activity. Additionally, AKR1C4 from Homo sapiens exhibited very good activity.

### Example 7—Converting 7α-hydroxy-4-cholesten-3-one to 7α,12α-dihydrog-4-cholesten-3-one

[0383] Strains expressing A. thaliana DHCR7 and H. sapiens DHCR24 were genetically engineered to further express M. musculus CYP7A1, ADX from D. rerio and B. taurus, B. taurus ADR, H. sapiens HSD3B7, and CYP8B1.

[0384] The strains were then tested by GC/MS for their ability to add a third hydroxyl group to the C12 in the cholesterol backbone. The strains were tested for their ability to produce 7α,12α-dihydroxy-4-cholesten-3-one from 7α-hydroxy-4-cholesten-3-one.

[0385] As shown in FIG. 10, CYP8B1 from Mus musculus and Ogctolagus cuniculus exhibited the best activity. CYP8B1 from Homo sapiens and Sus scrofa also exhibited activity.

### Example 8—Converting 5β-cholestane-3α,7α-diol to (25R)-3α,7α-dihydrog-5β-cholestanoic acid (and Further to (25R)-3α,7α-dihydroxy-5β-cholestanoyl-CoA by Coupling with SLC27A5)

[0386] Strains expressing A. thaliana DHCR7 and H. sapiens DHCR24 and also transformed with other enzymes necessary to produce 5β-cholestane-3α,7α-diol were further genetically engineered to further express different CYP27A1 variants. 7 variants of CYP27A1 were tested in combination with 2 variants of ADX (D. rerio and B. taurus) and B. taurus ADR. Additionally, H. sapiens SLC27A5 was expressed to couple this CYP27A1 activity, allowing for detection of the SLC27A5 product by LC-MS instead.

[0387] As shown in FIG. 11, most of the CYP27A1 variants were able to produce the SLC27A5 product.

### Example 9—Converting (25R)-3α,7α,12α-trihydroxy-5β-cholestan-26-oic acid to (25R)-3α,7α,12α-trihydroxy-5β-cholestanoyl-CoA

[0388] Variants of solute carrier family 27 member 5 (SLC27A5) were integrated into wild type yeast strains that had been knocked out for the native yeast CoA-ligase, FAT1. The yeast strains were lysed and CoA ligase activity was detected on (25R)-3α,7α,12α-trihydroxy-5β-cholestan-26-oic acid when expressing different variants of SLC27A5.

[0389] As shown in FIG. 12A, HPLC data shows that there is a peak detected which is specific to ligase expressing strains. Further, as shown in FIG. 12B, mass spec data confirms that there exists a peak that confirms the presence of active ligase in the expressing strains. Additionally, CoA ligase also exhibits activity using 3α,5β,7α,12α,24E-trihydroxy-cholest-24-en-26-oic acid as the substrate.

### Example 10—Converting (25R)-3α,7α-dihydroxy-5β-cholestanoyl-CoA to (25S)-3α,7α-dihydrog-5β-cholestanoyl-CoA

[0390] Strains expressing A. thaliana DHCR7, H. sapiens DHCR24, M. musculus CYP7A1, ADX from D. rerio and B. taurus, B. taurus ADR, H. sapiens HSD3B7, M. musculus AKR1D1, M. fuscata AKR1C4, R. norvegicus CYP27A1, H. sapiens SLC27A5, and ACOX2 (from H. sapiens or Ogctolagus cuniculus), were used as background strains to test activity of several alpha-methylacyl-CoA racemases (AMACR). The yeast strains were lysed and (24E)-3α,7α-dihydroxy-5β-cholest-24-enoyl-CoA (product of ACOX2) was measured by LC/MS, since the racemization of (25R)-3α,7α-dihydroxy-5β-cholestanoyl-CoA to (25S)-3α,7α-dihydroxy-5β-cholestanoyl-CoA is difficult to detect.

[0391] As shown in FIG. 13A, AMACR from both Homo sapiens and Rattus norvegicus produced excellent racemization activity. Further, as shown in FIG. 13B, ACOX2 from Homo sapiens in combination with Homo sapien AMACR produces the most (24E)-3α,7α-dihydroxy-5β-cholest-24-enoyl-CoA.

### Example 11—Converting (25S)-3α,7α-dihydroxy-5β-cholestanoyl-CoA to (24E)-3α,7α-dihydroxy-5β-cholest-24-enoyl-CoA

[0392] Strains expressing A. thaliana DHCR7, H. sapiens DHCR24, M. musculus CYP7A1, ADX from D. rerio and B. taurus, B. taurus ADR, H. sapiens HSD3B7, M. musculus AKR1D1, M. fuscata AKR1C4, R. norvegicus CYP27A1, and H. sapiens SLC27A5, and AMACR (from Homo sapiens and Rattus norvegicus), were used as background strains to test activity of different acyl-CoA oxidase 2 (ACOX2). The yeast strains were lysed and (24E)-3α,7α-dihydroxy-5β-cholest-24-enoyl-CoA measured by LC/MS.

[0393] As shown in FIG. 14, ACOX2 from both Homo sapiens and Ogctolagus cuniculus produced the best activity. ACOX2 from Rattus norvegicus, Mus musculus, and Saccharomyces cerevisiae exhibited activity.

### Example 12—Converting (24E)-3α,7α,12α-trihydroxy-5β-cholest-24-enoyl-CoA to 3α,7α,12α-trihydroxy-24-oxo-5β-cholestanoyl-CoA

[0394] Strains expressing SLC27A5-CoA ligases were used as background strains to test activity of different hydroxysteroid 17-beta dehydrogenase 4 (HSD17B4). The yeast strains were lysed and in vitro assays conducted with added substrate 3α,5β,7α,12α,24E-trihydroxy-cholest-24-en-26-oic acid (SLC27A5 CoA-ligase activity has been verified on this substrate).

[0395] The intermediate product of this bifunctional enzyme HSD17B4, an alcohol, was detected. As shown in FIG. 15, HSD17B4 from Rattus norvegicus, Bos taurus, and Xenopus laevis produced the best activity. HSD17B4 from remaining 6 sources also exhibited activity.

### Example 13—Converting 3α,7α-dihydroxy-24-oxo-5β-cholestangl-CoA to 3α,7α-dihydrog-5β-cholan-24-yl-CoA

[0396] Strains expressing A. thaliana DHCR7, H. sapiens DHCR24, M. musculus CYP7A1, ADX from D. rerio and B. taurus, B. taurus ADR, H. sapiens HSD3B7, M. musculus AKR1D1, M. fuscata AKR1C4, R. norvegicus CYP27A1, and H. sapiens SLC27A5, R. norvegicus AMACR, H. sapiens ACOX2, and R. norvegicus HSD17B4 were used as background strains to test activity of sterol carrier protein 2 (SCP2). The background strain was also knocked out for its native yeast gene POT1 which encodes for a 3-ketoacyl-CoA thiolase and expressed Bacteroides fragilis 7α-HSD and Clostridium sardiniense 7β-HSD. Yeast pellets were extracted and subsequently analyzed for relative amounts of UDCA/UDC-CoA product by LC/MS.

[0397] As shown in FIG. 16, SCP2 activity was detected by LCMS in all samples, including negative control, however enhanced activity was observed in the strain overexpressing the native yeast gene POT1.

### Example 14—Converting 3α,7α-dihydrog-5β-cholan-24-oyl-CoA to 3α-hydroxy-7-oxo-5β-cholan-24-oyl-CoA to 3α,7β-dihydroxy-5β-cholan-24-oyl-CoA

[0398] Strains expressing S. cerevisiae truncated HMG, A. thaliana DHCR7, H. sapiens DHCR24, M. musculus CYP7A1, ADX from D. rerio and B. taurus, B. taurus ADR, H. sapiens HSD3B7, M. musculus AKR1D1, M. fuscata AKR1C4, R. norvegicus CYP27A1, and H. sapiens SLC27A5, R. norvegicus AMACR, H. sapiens ACOX2, and R. norvegicus HSD17B4, S. cerevisiae SCP2, pot1Δ, pox1Δ, and fox2Δ were used as background strains to determine the working 7alpha and 7beta-hydroxysteroid dehydrogenases, 7α-HSD and 7β-HSD, respectively.

[0399] Four variants of 7α-HSD (Escherichia coli (strain K12), Luminiphilus syltensis NORS-1B, Bacteroides fragilis, and Comamonas testosteroni (Pseudomonas testosterone)) were tested in the background strain (in this case also expressing an active C. sardiniense 7(-HSD) for their ability to produce UDC-CoA (also known as 3α,7β-dihydroxy-5β-cholanoyl-CoA having a chemical formula of C₄₅H₇₄N₇O₁₉P₃S with a mass of 1141.40 and a molecular weight of 1142.10).

[0400] Cell pellets were collected from 25 mL whole cell broth in 24 deep well plates. The cell pellets were re-suspended in a 2 mL 80% Methanol/Water mixture solution, vortexed for 30 minutes at 4° C., centrifuged for 5 minutes at 4° C. at 4000 rpm, and transferred 1.8 mL Supernatant to 24 deep well plate. The resulting pellets were dried and re-suspended in 200 μL of a 4:1 MPA (10 mM ammonium formate in water, pH 6):Methanol solution. This resuspension was filtered through a 0.2 μm filter. This final filtered product was measured by liquid chromatography followed by mass spectrometry for the presence of UDC-CoA. A flow chart showing these steps is shown in FIG. 3.

[0401] As shown in FIG. 17, 7a-HSD from E. coi and B. fragilis, exhibited significant activity. 7α-HSD from L. syltensis and C. testosterioni showed activity as well.

[0402] Four variants of 7β-HSD (Pseudomonas syringae pv. atrofaciens, Pseudomonas cruicapapayae, Drosophila persimilis (Fruit fly), and Clostridium sardiniense)) were also tested in a background strain (in this case also expressing an active B. fragilis 7α-HSD) for their ability to produce UDC-CoA. The same procedure described above was used.

[0403] As shown in FIG. 18, 7β-HSD from Clostridium sardiniense exhibited the best activity. 7β-HSD from Pseudomonas caricapapayae also exhibited some activity.

### Example 15—Confirmation that UDC-CoA was Made

[0404] In order to verify that UDC-CoA from Example 14 was indeed produced, two additional methods of processing samples for use in mass spectrometry were conducted. As seen in FIG. 4, the initial pellets were split into two samples. The first sample was washed with 2 mL of 80% Methanol/H₂O, vortexed, centrifuged, transferred and dried.

[0405] The first sample, as with the second sample, went through the same processing from this point on.

[0406] 750 μL of 1N NaOH were added to the pellets and incubated for 60 minutes at 60° C. The sample was then acidified with 500 μL of 2N HCl. 4 mL of EtOAc was added and vortexed for 20 minutes. 3 mL of the organic layer was removed and dried. This was resuspended in 200 μL methanol and filtered through a 0.45 μM filter.

[0407] Both direct hydrolysis of the pellets and the indirect hydrolysis of the steroidal-CoA extracts resulted in the detectable UDCA, CDCA, (24E)-3α,7α-dihydroxy-cholest-24-enoic acid, and 3α,7α(-dihydroxy-5β-cholestanoic acid. Direct hydrolysis of the pellets seems to yield more.

### Example 16—Combination of Thiolase/7α-HSD/7β-HSD

[0408] Strains expressing S. cerevisiae truncated HMG, A. thaliana DHCR7, H. sapiens DHCR24, M. musculus CYP7A1, H. sapiens HSD3B7, M. musculus AKR1D1, M. fuscata AKR1C4, R. norvegicus CYP27A1, and H. sapiens SLC27A5, R. norvegicus AMACR, H. sapiens ACOX2, and R. norvegicus HSD17B4, pot1A, pox1A, and fox2A, were used as background strains to determine the best combination of thiolase/SCP2, 7α-HSD, and 7β-HSD.

[0409] The strains were then tested by GC/MS for its ability to produce UDCA/UDC-CoA. As seen in FIG. 19, the combination of S. cerevisiae POT1 Thiolase, E. coli 7α-HSD, and C. sardiniense 7β-HSD and S. cerevisiae POT1 Thiolase, B. fragilis 7α-HSD, and C. sardiniense 7β-HSD lead to the greatest amounts of UDCA/UDC-CoA production. Other combinations produced detectable levels of UDCA/UDC-CoA production, as seen in FIG. 19.

### Example 17—Identification of Engvnes that Convert Sugar to Cholic Acid and Generating Strains that can Make Cholic Acid

[0410] Eleven heterologous enzymes (from the perspective of a Saccharomyces cerevisiae) were identified as possible enzymes that could be used to make cholic acid from cholesterol. See e.g., FIG. 22. Two (2) additional enzymes were also identified as possible enzymes that could be used to convert sugar to cholesterol. See e.g., FIG. 2.

[0411] Genes encoding these enzymes were synthesized and then cloned into yeast expression vectors suitable for integration into the yeast genome. These integration constructs were subsequently transformed into Saccharomyces cerevisiae using standard yeast chemical transformation protocol, utilizing Lithium Acetate and PEG (3350). The transformed yeast were grown to mid log phase, then centrifuged at 4000 rpm with the supernatant removed. Pellets were washed with water and centrifuged again. The resulting pellet was resuspended in master mix containing 100 mM lithium acetate, 40% PEG (MW 3,350), 0.35 mg/ml carrier DNA (sheared salmon sperm DNA), and 50 to 500 ng of DNA to be transformed. The cell suspension was then incubated at 30° C. for 30 minutes, followed by at 45 minute heat shock at 42° C. At this point, nutritional selection was plated, while antifungal selection underwent a 4 hr to overnight recovery in rich yeast media before plating on agar containing the antifungal drug. Plates were then incubated at 30° C. for 2 to 3 days. After colonies were formed, proper integrations were verified by colony PCR before using strain in experiments.

[0412] Table 2 shows representative genes that were expressed in the yeast strains and the genetic origin of the enzymes that exhibited the best activity. Genes from other sources were also found to be active, but are not represented on Table 2.

TABLE 2

| Gene/enzyme | SEQ ID NO(s). | Source of Variants |
|---|---|---|
| ADR | 239 | Bovine |
| ADX | 241, 243, 245, 247, | Bovine, Zebrafish, |
| | 249, 251, 253, 255, | human |
| | 257, 259, 261 | |
| DHCR7 | 1 | Arabidopsis |
| DHCR24 | 21, 23, 25, 27, 45, 47 | Human, Bovine, |
| | | Zebrafish |
| CYP7A1 | 53, 65, 67, 69, 71, 73, | Mouse |
| | 75, 77, 79 | |
| HSD3B7 | 81, | Human |
| AKR1D1 | 91 | Mouse |
| AKR1C4 | 101 | Macaca fuscata |
| CYP27A1 | 125, 129, 131 | Rat, Mouse, Bovine |
| SLC27A5 | 139 | Human |
| AMACR | 145, 147 | Rat, Human |
| ACOX2 | 159, 165 | Human, Rabbit |
| HSD17B4 | 179, 183, 189 | Rat, Bovine, Xenopus |
| SCP2 | 203 | Yeast (POT1) |
| CYP8B1 | 269 | Mouse |

[0413] Strains with the ability to produce cholesterol were genetically engineered to further express CYP7A1, ADX (2 variants), ADR, and HSD3B7. The activities of CYP7A1 and HSD3B7 were demonstrated as described in Examples 3 and 4.

### Example 18—Converting 7α-hydroxy-4-cholesten-3-one to 7α,12α-dihydrog-4-cholesten-3-one

[0414] Strains expressing A. thaliana DHCR7, H. sapiens DHCR24 were genetically engineered to further express M. musculus CYP7A1, ADX (from D. rerio and B. taurus), B. taurus ADR, H. sapiens HSD3B7, and CYP8B1.

[0415] The strains were tested for their abilities to produce 7α,12α-dihydroxy-4-cholesten-3-one from 7α-hydroxy-4-cholesten-3-one.

[0416] As shown in FIG. 23, CYP8B1 from Mus musculus and Ogctolagus cuniculus exhibited the best activity. CYP8B1 from Homo sapiens and Sus scrofa also exhibited activity.

### Example 19—Confirmation that Choloyl-CoA was Made

[0417] Strains expressing S. cerevisiae truncated HMG, A. thaliana DHCR7, H. sapiens DHCR24, M. musculus CYP7A1, B. taurus ADX, B. taurus ADR, H. sapiens HSD3B7, M. musculus AKR1D1, M. fuscata AKR1C4, R. norvegicus CYP27A1, and H. sapiens SLC27A5, R. norvegicus AMACR, H. sapiens ACOX2, R. norvegicus HSD17B4, and S. cerevisiae SCP2 were used as background strains to determine the working CYP8B1.

[0418] One variant of CYP8B1 was tested (Mus musculus) in the background strain for its ability to produce choloyl-CoA (also known as 3α,7α,12α-trihydroxy-5(-cholan-24-oyl-CoA, having a chemical formula of C₄₅H₇₄N₇O₂₀P₃S with a mass of 1157.4 and a molecular weight of 1158.1). The hydrolyzed acid form of choloyl-CoA, cholic acid (also known as 3α,7α,12α-trihydroxy-5β-cholan-24-oic acid, having a chemical formula of C₂₄H₄₀O₅ with a mass of 408.3 and a molecular weight of 408.58) was the measureable product.

[0419] Cell pellets were collected from 15 mL whole cell broth in 24 deep well plates. The cell pellets were re-suspended in a 2 mL 80% Methanol/Water mixture solution, vortexed for 30 minutes at 4° C., centrifuged for 5 minutes at 4° C. at 4000 rpm, and 1.8 mL supernatant was transferred to 24 deep well plate. The supernatant was dried overnight at 40° C. on centrivap. The dried extracts were hydrolyzed with 750 μL 1N NaOH at 60° C. for 1 hour with vortexing, followed by acidification with 500 μL 2N HCl. The acidified samples were extracted with 4 mL ethyl acetate. 3.5 mL of the organic layer was transferred to a 24 deep well plate and dried at 45° C. on centrivap. The dried extracts were resuspended in 200 μL methanol and filtered through a 0.2 μm filter. This final filtered product was measured by liquid chromatography followed by mass spectrometry for the presence of cholic acid (hydrolyzed choloyl-CoA). A flow chart showing these steps is shown in FIG. 24.

[0420] As shown in FIG. 25, the CYP8B1 from Mus musculus was active and produced choloyl-CoA (cholic acid detected). No cholic acid was detected in the strain lacking the CYP8B1 enzyme.

1. A genetically-modified cell capable of producing UDCA or a UDCA precursor comprising at least one heterologous polynucleotide encoding an enzyme involved in a metabolic pathway that converts sugar to UDCA or a UDCA precursor.

2. The cell of claim 1, comprising at least two heterologous polynucleotides, each encoding an enzyme involved in a metabolic pathway that converts sugar to UDCA or a UDCA precursor, wherein the encoded enzymes are operably connected along the metabolic pathway.

3. The cell of claim 1 or 2, wherein the UDCA precursor is desmosterol; cholesterol; 7-alpha-hydroxycholesterol; 7α-hydroxy-4-cholesten-3-one; 7α-hydroxy-5β-cholestan-3-one; 5β-cholestane-3α,7α-diol; (25R)-3α,7α-dihydroxy-5β-cholestanoic acid; (25R)-3α,7α-dihydroxy-5β-chole stanoyl-CoA; (25S)-3α,7α-dihydroxy-5β-cholestanoyl-CoA; (24E) -3α,7α-dihydroxy-5β-cholest-24-enoyl-CoA; 3α,7α-dihydroxy-24-oxo-5β-cholestanoyl-CoA; 3α,7α-dihydroxy-5β-cholan-24-oyl-CoA; 3α-hydroxy-7-oxo-5β-cholan-24-oyl-CoA; 3α,7β-dihydroxy-5β-cholan-24-oyl-CoA; 7α,12α-dihydroxy-4-cholesten-3-one; 7α,12α-dihydroxy-5β-cholestan-3-one; 5β-cholestane-3α,7α,12α-triol; (25R)-3α,7α,12α-trihydroxy-5β-cholestan-26-oic acid; (25R)-3α,7α,12α-trihydroxy-5β-cholestanoyl-CoA; (25S)-3α,7α,12α-trihydroxy-5β-cholestanoyl-CoA; (24E)-3α,7α,12α-trihydroxy-5β-cholest-24-enoyl-CoA; 3α,7α,12α-trihydroxy-24-oxo-5β-cholestanoyl-CoA; 3α,7α,12α-trihydroxy-5β-cholan-24-oyl-CoA; or cholic acid.

4. The cell of any one of claims 1-3, wherein the encoded enzyme is DHCR7, DHCR24, CYP7A1, HSD3B7, CYP8B1, AKR1D1, AKR1C9, AKR1C4, CYP27A1, SLC27A5, FAT1, AMACR, ACOX2, PDX1, HSD17B4, FOX2, SCP2, POT1, ERG10, 7α-HSD, 7β-HSD, or choloyl-CoA hydrolase.

5. The cell of any one of claims 1-4, wherein the encoded enzyme is involved in the metabolic pathway that converts sugar to cholesterol.

6. The cell of any one of claims 1-4, wherein the encoded enzyme is involved in the metabolic pathway that converts cholesterol to CDC-CoA.

7. The cell of any one of claims 1-4, wherein the encoded enzyme is involved in the metabolic pathway that converts cholesterol to cholic acid.

8. The cell of any one of claims 1-4, wherein the encoded enzyme is involved in the metabolic pathway that converts CDC-CoA to UDCA.

9. The cell of any one of claims 1-5, wherein the encoded enzyme is:
DHCR7 and is encoded by a polynucleotide comprising a nucleic acid sequence that is substantially identical to any one of SEQ ID NOs: 2, 4, 6, 8, 10, or 12; or
DHCR24 and is encoded by a polynucleotide comprising a nucleic acid sequence that is substantially identical to any one of SEQ ID NOs: 14, 15, 16, 18, 19, 20, 22, 23, 24, 26, 27, 28, 30, 31, 32, 34, 35, 36, 38, 39, 40, 42, 44, 46, or 48.

10. The cell of any one of claim 1-4 or 6-7, wherein the encoded enzyme is:
CYP7A1 and is encoded by a polynucleotide comprising a nucleic acid sequence that is substantially identical to any one of SEQ ID NOs: 50, 52, 54, 56, 58, 60, 62, 64, 66, 68, 70, 72, 74, 76, 78, or 80;
HSD3B7 and is encoded by a polynucleotide comprising a nucleic acid sequence that is substantially identical to any one of SEQ ID NOs: 82, 84, 86, or 88;
CYP8B1 and is encoded by a polynucleotide comprising a nucleic acid sequence that is substantially identical to any one of SEQ ID NOs: 266, 268, 270, 272, 274, 276, or 278;
AKR1D1 and is encoded by a polynucleotide comprising a nucleic acid sequence that is substantially identical to any one of SEQ ID NOs: 90, 92, 94, or 96;
AKR1C9 and is encoded by a polynucleotide comprising a nucleic acid sequence that is substantially similar to SEQ ID NO: 98;
AKR1C4 and is encoded by a polynucleotide comprising a nucleic acid sequence that is substantially identical to any one of SEQ ID NOs: 100, 102, 104, 106, 108, 110, 112, 114, 116, 118, 120, or 122;
CYP27A1 and is encoded by a polynucleotide comprising a nucleic acid sequence that is substantially identical to any one of SEQ ID NOs: 124, 126, 128, 130, 132, 134, 136, or 138;
SLC27A5 and is encoded by a polynucleotide comprising a nucleic acid sequence that is substantially identical to SEQ ID NOs: 140 or 142;
FAT1 and is encoded by a polynucleotide comprising a nucleic acid sequence that is substantially identical to SEQ ID NO: 144;
AMACR and is encoded by a polynucleotide comprising a nucleic acid sequence that is substantially identical to any one of SEQ ID NOs: 146, 148, 150, 152, 154, 156, or 158;
ACOX2 and is encoded by a polynucleotide comprising a nucleic acid sequence that is substantially identical to any one of SEQ ID NOs: 160, 162, 164, 166, 168, 170, 172, or 174;
PDX1 and is encoded by a polynucleotide comprising a nucleic acid sequence that is substantially identical to SEQ ID NO: 176;
HSD17B4 and is encoded by a polynucleotide comprising a nucleic acid sequence that is substantially identical to any one of SEQ ID NOs: 178, 180, 182, 184, 186, 188, 190, or 192;
FOX2 and is encoded by a polynucleotide comprising a nucleic acid sequence that is substantially identical to SEQ ID NO: 194;
SCP2 and is encoded by a polynucleotide comprising a nucleic acid sequence that is substantially identical to any one of SEQ ID NOs: 196, 198, 200, or 202;
POT1 and is encoded by a polynucleotide comprising a nucleic acid sequence that is substantially identical to SEQ ID NO: 204; or
ERG10 and is encoded by a polynucleotide comprising a nucleic acid sequence that is substantially identical to SEQ ID NO: 206.

11. The cell of claim 8, wherein the encoded enzyme is:
7α-HSD and is encoded by a polynucleotide comprising a nucleic acid sequence that is substantially identical to any one of SEQ ID NOs: 208, 210, 212, or 214;
7β-HSD is encoded by a polynucleotide comprising a nucleic acid sequence that is substantially identical to any one of SEQ ID NOs: 216, 218, 220, or 222; and
choloyl-CoA hydrolase is encoded by a polynucleotide comprising a nucleic acid sequence that is substantially identical to any one of SEQ ID NOs: 224, 226, 228, or 230.

12. The cell of any one of claims 1-11, further comprising a heterologous polynucleotide encoding ADR, ADX, and/or a truncated HMG

13. The cell of any one of claims 1-12, wherein the cell is a microorganism or part of a microorganism.

14. The cell of any one of claims 1-13, wherein the cell is bacterium or a yeast.

15. The cell of any one of claims 1-14, wherein the cell is Saccharomyces cerevisiae.

16. A method of making UDCA or a UDCA precursor, the method comprising:
(a) contacting a substrate with the genetically-modified cell of any one of claims 1-15; and
(b) growing the cell to make UDCA or UDCA precursor.

17. The method of claim 16, further comprising isolating the UDCA or UDCA precursor from the cell.

18. The use of UDCA or UDCA precursor made using the method of claim 16 or 17 for the manufacture of a medicament for the treatment of a disease or a symptom of a disease.

19. The use of claim 19, wherein the disease or symptom of a disease is gallstones, primary biliary cirrhosis, cystic fibrosis, impaired bile flow, intrahepatic cholestasis of pregnancy, and/or cholelithiasis.

20. A medicament comprising UDCA or UDCA precursor made using the method of claim 16 or 17.

21. A method of treating a disease or symptom of a disease comprising administering UDCA or a UDCA precursor made using the method of claim 15 or 16 to a subject in need thereof.

22. The method of claim 21 wherein the disease or symptom of a disease is gallstones, primary biliary cirrhosis, cystic fibrosis, impaired bile flow, intrahepatic cholestasis of pregnancy, and/or cholelithiasis.

23. An isolated polynucleotide encoding at least one enzyme involved in a metabolic pathway that converts sugar to UDCA or a UDCA precursor.

24. The polynucleotide of claim 23, wherein the encoded enzyme is DHCR7, DHCR24, CYP7A1, HSD3B7, CYP8B1, AKR1D1, AKR1C9, AKR1C4, CYP27A1, SLC27A5, FAT1, AMACR, ACOX2, PDX1, HSD17B4, FOX2, SCP2, POT1, ERG10, 7α-HSD, 7β-HSD, or choloyl-CoA hydrolase.

25. The polynucleotide of claim 23 or 24, wherein the encoded enzyme is involved in the metabolic pathway that converts sugar to cholesterol.

26. The polynucleotide of claim 23 or 24, wherein the encoded enzyme is involved in the metabolic pathway that converts cholesterol to CDC-CoA.

27. The polynucleotide of claim 23 or 24, wherein the encoded enzyme is involved in the metabolic pathway that converts cholesterol to cholic acid.

28. The polynucleotide of claim 23 or 24, wherein the encoded enzyme is involved in the metabolic pathway that converts CDC-CoA to UDCA.

29. The polynucleotide of any one of claims 23-25, wherein the encoded enzyme is:
DHCR7 and the polynucleotide comprises a nucleic acid sequence that is substantially identical to any one of SEQ ID NOs: 2, 4, 6, 8, 10, or 12; or
DHCR24 and the polynucleotide comprises a nucleic acid sequence that is substantially identical to any one of SEQ ID NOs: 14, 15, 16, 18, 19, 20, 22, 23, 24, 26, 27, 28, 30, 31, 32, 34, 35, 36, 38, 39, 40, 42, 44, 46, or 48.

30. The polynucleotide of any one of claims 23-24 and 26-27, wherein the encoded enzyme is:
CYP7A1 and the polynucleotide comprises a nucleic acid sequence that is substantially identical to any one of SEQ ID NOs: 50, 52, 54, 56, 58, 60, 62, 64, 66, 68, 70, 72, 74, 76, 78, or 80;
HSD3B7 and the polynucleotide comprises a nucleic acid sequence that is substantially identical to any one of SEQ ID NOs: 82, 84, 86, or 88;
CYP8B1 and the polynucleotide comprises a nucleic acid sequence that is substantially identical to any one of SEQ ID NOs: 266, 268, 270, 272, 274, 276, or 278;
AKR1D1 and the polynucleotide comprises a nucleic acid sequence that is substantially identical to any one of SEQ ID NOs: 90, 92, 94, or 96;
AKR1C9 and the polynucleotide comprises a nucleic acid sequence that is substantially similar to SEQ ID NO: 98;
AKR1C4 and the polynucleotide comprises a nucleic acid sequence that is substantially identical to any one of SEQ ID NOs: 100, 102, 104, 106, 108, 110, 112, 114, 116, 118, 120, or 122;
CYP27A1 and the polynucleotide comprises a nucleic acid sequence that is substantially identical to any one of SEQ ID NOs: 124, 126, 128, 130, 132, 134, 136, or 138;
SLC27A5 and the polynucleotide comprises a nucleic acid sequence that is substantially identical to SEQ ID NOs: 140 or 142;
FAT1 and the polynucleotide comprises a nucleic acid sequence that is substantially identical to SEQ ID NO: 144;
AMACR and the polynucleotide comprises a nucleic acid sequence that is substantially identical to any one of SEQ ID NOs: 146, 148, 150, 152, 154, 156, or 158;
ACOX2 and the polynucleotide comprises a nucleic acid sequence that is substantially identical to any one of SEQ ID NOs: 160, 162, 164, 166, 168, 170, 172, or 174;
PDX1 and the polynucleotide comprises a nucleic acid sequence that is substantially identical to SEQ ID NO: 176;
HSD17B4 and the polynucleotide comprises a nucleic acid sequence that is substantially identical to any one of SEQ ID NOs: 178, 180, 182, 184, 186, 188, 190, or 192;
FOX2 and the polynucleotide comprises a nucleic acid sequence that is substantially identical to SEQ ID NO: 194;
SCP2 and the polynucleotide comprises a nucleic acid sequence that is substantially identical to any one of SEQ ID NOs: 196, 198, 200, or 202;
POT1 and the polynucleotide comprises a nucleic acid sequence that is substantially identical to SEQ ID NO: 204; or
ERG10 and the polynucleotide comprises a nucleic acid sequence that is substantially identical to SEQ ID NO: 206.

31. The polynucleotide of any one of claims 23-24 and 28, wherein the encoded enzyme is:
7α-HSD and the polynucleotide comprises a nucleic acid sequence that is substantially identical to any one of SEQ ID NOs: 208, 210, 212, or 214;
7β-HSD and the polynucleotide comprises a nucleic acid sequence that is substantially identical to any one of SEQ ID NOs: 216, 218, 220, or 222; and
choloyl-CoA hydrolase and the polynucleotide comprises a nucleic acid sequence that is substantially identical to any one of SEQ ID NOs: 224, 226, 228, or 230.

32. A vector comprising a nucleic acid encoding at least one enzyme involved in a metabolic pathway that converts sugar to UDCA or a UDCA precursor.

33. The vector of claim 32, wherein the encoded enzyme is DHCR7, DHCR24, CYP7A1, HSD3B7, CYP8B1, AKR1D1, AKR1C9, AKR1C4, CYP27A1, SLC27A5, FAT1, AMACR, ACOX2, PDX1, HSD17B4, FOX2, SCP2, POT1, ERG10, 7α-HSD, 7β-HSD, or choloyl-CoA hydrolase.

34. The vector of claim 32 or 33, wherein the encoded enzyme is involved in the metabolic pathway that converts sugar to cholesterol.

35. The vector of claim 32 or 33, wherein the encoded enzyme is involved in the metabolic pathway that converts cholesterol to CDC-CoA.

36. The vector of claim 32 or 33, wherein the encoded enzyme is involved in the metabolic pathway that converts cholesterol to cholic acid.

37. The vector of claim 32 or 33, wherein the encoded enzyme is involved in the metabolic pathway that converts CDC-CoA to UDCA.

38. The vector of any one of claims 32-34, wherein the encoded enzyme is:
DHCR7 and the vector comprises a nucleic acid sequence that is substantially identical to any one of SEQ ID NOs: 2, 4, 6, 8, 10, or 12; or
DHCR24 and the vector comprises a nucleic acid sequence that is substantially identical to any one of SEQ ID NOs: 14, 15, 16, 18, 19, 20, 22, 23, 24, 26, 27, 28, 30, 31, 32, 34, 35, 36, 38, 39, 40, 42, 44, 46, or 48.

39. The vector of any one of claims 32-33 and 35-36, wherein the encoded enzyme is:
CYP7A1 and the vector comprises a nucleic acid sequence that is substantially identical to any one of SEQ ID NOs: 50, 52, 54, 56, 58, 60, 62, 64, 66, 68, 70, 72, 74, 76, 78, or 80;
HSD3B7 and the vector comprises a nucleic acid sequence that is substantially identical to any one of SEQ ID NOs: 82, 84, 86, or 88;
CYP8B1 and the vector comprises a nucleic acid sequence that is substantially identical to any one of SEQ ID NOs: 266, 268, 270, 272, 274, 276, or 278;
AKR1D1 and the vector comprises a nucleic acid sequence that is substantially identical to any one of SEQ ID NOs: 90, 92, 94, or 96;
AKR1C9 and the vector comprises a nucleic acid sequence that is substantially identical to SEQ ID NO: 98;
AKR1C4 and the vector comprises a nucleic acid sequence that is substantially identical to any one of SEQ ID NOs: 100, 102, 104, 106, 108, 110, 112, 114, 116, 118, 120, or 122;
CYP27A1 and the vector comprises a nucleic acid sequence that is substantially identical to any one of SEQ ID NOs: 124, 126, 128, 130, 132, 134, 136, or 138;
SLC27A5 and the vector comprises a nucleic acid sequence that is substantially identical to SEQ ID NOs: 140 or 142;
FAT1 and the vector comprises a nucleic acid sequence that is substantially identical to SEQ ID NO: 144;
AMACR and the vector comprises a nucleic acid sequence that is substantially identical to any one of SEQ ID NOs: 146, 148, 150, 152, 154, 156, or 158;
ACOX2 and the vector comprises a nucleic acid sequence that is substantially identical to any one of SEQ ID NOs: 160, 162, 164, 166, 168, 170, 172, or 174;
PDX1 and the vector comprises a nucleic acid sequence that is substantially identical to SEQ ID NO: 176;
HSD17B4 and the vector comprises a nucleic acid sequence that is substantially identical to any one of SEQ ID NOs: 178, 180, 182, 184, 186, 188, 190, or 192;
FOX2 and the vector comprises a nucleic acid sequence that is substantially identical to SEQ ID NO: 194;
SCP2 and the vector comprises a nucleic acid sequence that is substantially identical to any one of SEQ ID NOs: 196, 198, 200, or 202;
POT1 and the vector comprises a nucleic acid sequence that is substantially identical to SEQ ID NO: 204; or
ERG10 and the vector comprises a nucleic acid sequence that s substantially identical to SEQ ID NO: 206.

40. The vector of any one of claims 32-33 and 37, wherein the encoded enzyme is:
7α-HSD and the vector comprises a nucleic acid sequence that is substantially identical to any one of SEQ ID NOs: 208, 210, 212, or 214;
7β-HSD and the vector comprises a nucleic acid sequence that is substantially identical to any one of SEQ ID NOs: 216, 218, 220, or 222; and
choloyl-CoA hydrolase and the vector comprises a nucleic acid sequence that is substantially identical to any one of SEQ ID NOs: 224, 226, 228, or 230.

41. A method of making a genetically-modified cell capable of synthesizing UDCA or a UDCA precursor, the method comprising:
(a) contacting a cell with at least one heterologous polynucleotide encoding an enzyme involved in a metabolic pathway that converts sugar to UDCA or a UDCA precursor; and
(b) growing the cell so that said polynucleotide is inserted into said microorganism.

42. The method of claim 41, wherein said cell is a bacterium or a yeast cell.

43. The method of claim 41 or 42, wherein the cell is a Saccharomyces cerevisiae cell.

44. A composition comprising UDCA or a UDCA precursor, a free acid or CoA thereof, or a pharmaceutically-acceptable derivative or prodrug thereof, the UDCA, UDCA precursor, free acid or CoA thereof, or pharmaceutically-acceptable derivative or prodrug thereof produced by a method of claim 16 or 17.

The application's sequence listing, which the Patent Office published only in electronic form, follows.

SEQUENCE LISTING (278 sequences)

SEQ ID NO: 1 - protein, 432 aa, Arabidopsis thaliana
MAETVHSPIVTYASMLSLLAFCPPFVILLWYTMVHQDGSVTQTFGFFWENGVQGLINIWPRPTLIAWKIIFCYGAFEAILQLLLPGKRVEGPISPAGNRPVYKANGLAAYFVTLATYLGLWWFGIFNPAIVYDHLGEIFSALIFGSFIFCVLLYIKGHVAPSSSDSGSCGNLIIDFYWGMELYPRIGKSFDIKVFTNCRFGMMSWAVLAVTYCIKQYEINGKVSDSMLVNTILMLVYVTKFFWWEAGYWNTMDIAHDRAGFYICWGCLVWVPSVYTSPGMYLVNHPVELGTQLAIYILVAGILCIYINYDCDRQRQEFRRTNGKCLVWGRAPSKIVASYTTTSGETKTSLLLTSGWWGLARHFHYVPEILSAFFWTVPALFDNFLAYFYVIFLTLLLFDRAKRDDDRCRSKYGKYWKLYCEKVKYRIIPGIY

SEQ ID NO: 2 - DNA, 1299 bp, Arabidopsis thaliana
atggccgaaactgttcactctcctattgtaacctacgcttcaatgttgtcattattggctttttgcccaccttttgttatattgttatggtataccatggtccatcaggatggttctgtaacacagaccttcggtttcttctgggagaatggagttcagggattgattaatatctggcctaggccaacattgattgcctggaagattatattctgctacggagcttttgaggctatcttacagttgttgttgcctggaaaaagagtagaaggtccaatctctccagctggtaacagaccagtctacaaggctaacggattggctgcctactttgttaccttagccacctacttgggattatggtggttcggtatttttaaccctgctattgtttatgaccatttaggtgaaatattctctgctttgatttttggatctttcatattttgtgtcttgttgtacatcaagggacatgtagcaccttcttcttctgattctggttcatgtggtaatttgatcattgatttttactggggtatggaattatatccaaggatcggtaaatcattcgatataaaagtatttacaaattgtaggtttggtatgatgtcttgggcagtcttagctgtcacatactgtataaaacaatatgaaattaatggtaaggtttcagattcaatgttggtaaatactattttgatgttggtatatgttacaaagttcttttggtgggaagcaggttattggaataccatggacatcgctcacgatagagcaggtttttacatctgttggggttgtttggtctgggttccatctgtatatacatcaccaggtatgtatttggtcaatcatccagttgaattgggtactcagttggccatatatatcttggttgccggaatcttatgtatatatattaattatgattgtgacagacaaagacaggaatttaggagaactaatggaaagtgtttggtatggggaagagcaccatctaagattgtcgcatcatacactactacatcaggtgaaacaaagacatcattattattaacttcaggatggtggggattggccaggcactttcactacgttcctgagatcttgtctgctttcttctggacagtccctgctttgtttgacaactttttagcctatttttatgttatatttttgactttgttattattcgatagagctaagagagatgacgatagatgtagatctaaatatggaaagtactggaaattatattgtgaaaaagtcaaatacagaattattccaggtatctactaa

SEQ ID NO: 3 - protein, 475 aa, Bos taurus
MAAKSQPSAPKTKSTSGLTNGNAAAQGQWGRAWEVDWFSLASVIFLLLFAPFIVYYFIMACDQYGCSLTVPVADLATGRARLADIWARTPPVTAKAAQIYTAWVTLQVLLYMLLPDFCHKFLPGYVGGVQEGAVTPAGAVNKYEINGLQAWLLTHLLWFANAHLLGWFSPTIIFDNWIPLLWCANILGYTVSTFAMVKGYLFPTDARECKFTGNFFYNYMMGVEFNPRIGKWFDFKLFFNGRPGIVAWTLINLSFAAKQQELYGHVTNSMVLVNILQAIYVLDFFWNETWYLKTIDICHDHFGWYLGWGDCVWLPYLYTLQGLYLVYHPVQLPTYYALGVLLLGLLGYYIFRMTNHQKDLFRRTDGRCLIWGRKPKAIECSYTSADGQRHHSKLLVSGFWGVARHFNYTGDLMGSLAYCLACGGGHLLPYFYIIFMAILLTHRCLRDEHRCANKYGRDWEHYTAAVPYRLLPGIF

SEQ ID NO: 4 - DNA, 1428 bp, Bos taurus
atggctgctaagtctcaaccatctgctccaaaaactaaatccacctccggtttgaccaacggtaacgctgctgctcaaggtcaatggggtagagcttgggaagtcgattggttctctttggcttctgttattttcttgttgttgtttgccccatttatcgtctactacttcatcatggcttgtgatcaatacggttgttccttgactgttccagtcgctgacttggctaccggtagagctagattggctgacatctgggccagaaccccaccagtcaccgctaaggccgctcaaatctacactgcttgggtcactttgcaagttttgttgtacatgttgttgccagatttctgtcacaagttcttgccaggttacgtcggtggtgtccaagaaggtgccgtcaccccagctggtgctgtcaacaagtacgaaatcaacggtttgcaagcctggttgttgacccacttgttgtggttcgctaacgcccacttgttgggttggttttctccaaccatcatcttcgacaactggattccattgttgtggtgtgctaacatcttgggttacaccgtttctacttttgctatggttaaaggttacttgttcccaaccgacgccagagaatgtaaattcactggtaacttcttttacaactacatgatgggtgttgaatttaacccaagaattggtaaatggttcgatttcaaattgttctttaacggtagaccaggtattgttgcttggaccttgatcaacttgtccttcgctgccaaacaacaagaattgtacggtcatgttaccaactctatggtcttggtcaacatcttgcaagctatttacgttttggacttcttctggaacgaaacctggtacttgaagactattgatatctgtcacgaccactttggttggtacttgggttggggtgactgtgtttggttgccatacttgtacactttgcaaggtttgtacttggtttaccatccagttcaattgccaacttactacgccttgggtgtcttgttgttgggtttgttgggttactacattttcagaatgactaaccaccaaaaggacttgttcagaagaaccgacggtagatgtttgatctggggtagaaaaccaaaggccatcgaatgttcctacacctccgctgacggtcaaagacatcactccaagttgttggtctctggtttctggggtgttgctagacatttcaactacaccggtgacttgatgggttccttggcttactgtttggcctgtggtggtggtcatttgttgccatacttctacatcattttcatggctatcttgttgacccatagatgtttgagagatgaacacagatgtgctaacaagtacggtagagattgggaacactacactgccgctgttccatacagattgttgccaggtatcttctaa

SEQ ID NO: 5 - protein, 475 aa, Homo sapiens
MAAKSQPNIPKAKSLDGVTNDRTASQGQWGRAWEVDWFSLASVIFLLLFAPFIVYYFIMACDQYSCALTGPVVDIVTGHARLSDIWAKTPPITRKAAQLYTLWVTFQVLLYTSLPDFCHKFLPGYVGGIQEGAVTPAGVVNKYQINGLQAWLLTHLLWFANAHLLSWFSPTIIFDNWIPLLWCANILGYAVSTFAMVKGYFFPTSARDCKFTGNFFYNYMMGIEFNPRIGKWFDFKLFFNGRPGIVAWTLINLSFAAKQRELHSHVTNAMVLVNVLQAIYVIDFFWNETWYLKTIDICHDHFGWYLGWGDCVWLPYLYTLQGLYLVYHPVQLSTPHAVGVLLLGLVGYYIFRVANHQKDLFRRTDGRCLIWGRKPKVIECSYTSADGQRHHSKLLVSGFWGVARHFNYVGDLMGSLAYCLACGGGHLLPYFYIIYMAILLTHRCLRDEHRCASKYGRDWERYTAAVPYRLLPGIF

SEQ ID NO: 6 - DNA, 1428 bp, Homo sapiens
atggccgctaagtctcaaccaaacattccaaaagccaaatccttggacggtgttaccaacgacagaactgcttctcaaggtcaatggggtagagcttgggaagttgactggttctctttggcttccgttatctttttgttgttgtttgccccattcattgtttactacttcatcatggcttgtgaccaatactcttgtgctttgactggtccagttgttgatatcgttaccggtcacgctagattgtctgatatctgggccaagaccccaccaatcactagaaaggctgctcaattgtacaccttgtgggtcaccttccaagtcttgttgtacacctctttgccagacttctgtcacaagttcttgccaggttacgtcggtggtattcaagaaggtgctgttactccagctggtgtcgtcaacaagtaccaaatcaacggtttgcaagcctggttgttgacccatttgttgtggtttgctaacgctcacttgttgtcttggttctctccaaccattattttcgacaactggattccattgttgtggtgtgctaacatcttgggttacgctgtttctaccttcgccatggttaagggttacttcttcccaacctccgctagagattgtaagtttactggtaactttttctacaactacatgatgggtattgaatttaacccaagaattggtaagtggttcgatttcaagttgttcttcaacggtagaccaggtattgtcgcttggactttgatcaacttgtctttcgccgccaagcaaagagaattgcactctcacgtcaccaacgctatggtcttggtcaacgtcttgcaagccatttacgttattgacttcttctggaacgaaacctggtacttgaagaccatcgacatttgtcacgaccacttcggttggtacttgggttggggtgactgtgtttggttgccatacttgtacaccttgcaaggtttgtacttggtctaccacccagtccaattgtctactccacacgctgttggtgttttgttgttgggtttggttggttactacatcttcagagtcgctaaccaccaaaaggacttgttcagaagaaccgatggtagatgtttgatctggggtagaaagccaaaggtcattgaatgttcttacacctccgccgacggtcaaagacaccactccaagttgttggtttctggtttctggggtgttgctagacatttcaactacgttggtgacttgatgggttctttggcttactgtttggcctgtggtggtggtcacttgttgccatacttctacattatctacatggctattttgttgactcacagatgtttgagagatgaacatagatgtgcctccaagtacggtagagactgggaaagatacactgccgctgtcccatacagattgttgccaggtatcttctaa

SEQ ID NO: 7 - protein, 471 aa, Mus musculus
MASKSQHNAPKVKSPNGKAGSQGQWGRAWEVDWFSLASIIFLLLFAPFIVYYFIMACDQYSCSLTAPALDIATGHASLADIWAKTPPVTAKAAQLYALWVSFQVLLYSWLPDFCHRFLPGYVGGVQEGAITPAGVVNKYEVNGLQAWLITHILWFVNAYLLSWFSPTIIFDNWIPLLWCANILGYAVSTFAMIKGYLFPTSAEDCKFTGNFFYNYMMGIEFNPRIGKWFDFKLFFNGRPGIVAWTLINLSFAAKQQELYGHVTNSMILVNVLQAIYVLDFFWNETWYLKTIDICHDHFGWYLGWGDCVWLPYLYTLQGLYLVYHPVQLSTPNALGILLLGLVGYYIFRMTNHQKDLFRRTDGRCLIWGKKPKAIECSYTSADGLKHHSKLLVSGFWGVARHFNYTGDLMGSLAYCLACGGGHLLPYFYIIYMTILLTHRCLRDEHRCANKYGRDWERYTAAVPYRLLPGIF

SEQ ID NO: 8 - DNA, 1416 bp, Mus musculus
atggcttctaagtctcaacataacgctccaaaggtcaagtctccaaacggtaaggctggttctcaaggtcaatggggtagagcttgggaagtcgattggttctccttggcctccattatcttcttgttgttgttcgccccattcatcgtctactacttcattatggcttgtgatcaatactcctgttctttgactgctccagccttggacattgctactggtcacgcctccttggctgacatctgggctaagactccaccagtcaccgccaaggccgctcaattgtacgctttgtgggtctccttccaagttttgttgtactcctggttgccagacttctgtcatagattcttgccaggttacgttggtggtgttcaagaaggtgctatcaccccagctggtgtcgtcaacaagtacgaagtcaacggtttgcaagcctggttgattacccacatcttgtggttcgtcaacgcctacttgttgtcttggttctctccaactatcattttcgataactggattccattgttgtggtgtgccaacatcttgggttacgctgtttccactttcgccatgatcaagggttacttgttcccaacctctgctgaagactgtaagttcaccggtaacttcttctacaactacatgatgggtattgaatttaacccaagaattggtaagtggtttgactttaagttgtttttcaacggtagaccaggtatcgttgcctggactttgattaacttgtccttcgctgccaagcaacaagaattgtacggtcatgttactaactccatgattttggtcaacgtcttgcaagccatctacgtcttggatttcttctggaacgaaacttggtacttgaagaccattgacatttgtcatgaccacttcggttggtacttgggttggggtgactgtgtttggttgccatacttgtacaccttgcaaggtttgtacttggtctaccacccagtccaattgtctactccaaacgccttgggtatcttgttgttgggtttggttggttactacatcttcagaatgaccaaccaccaaaaggatttgtttagaagaactgacggtagatgtttgatctggggtaagaagccaaaggctattgaatgttcctacacctctgctgacggtttgaagcaccattccaagttgttggtctctggtttctggggtgttgctagacactttaactacaccggtgacttgatgggttccttggcttactgtttggcctgtggtggtggtcacttgttgccatacttttacattatttacatgactattttgttgacccacagatgtttgagagacgaacacagatgtgccaacaagtacggtagagattgggaaagatacactgctgctgtcccatacagattgttgccaggtattttttaa

SEQ ID NO: 9 - protein, 475 aa, Otolemur garnetti
MAAKSQPSTPKTKSPGSVSNGQTTSQGQWGRAWEVDWFSLASVIFLLLFAPFIVYYFIMTCDQYSCALTAPVVDIVTGRGRLSDIWARTPSVTVKAAQVYALWVTFQVLLYMWLPDFCHKFLPGYVGGIQEGAVTPAGVVNKYGINGLQAWLITHLLWFANSHLLFWFSPTIIFDNWIPLLWCANILGYAVSTFAMIKGYFFPTSAQDCKFTGNFFYNYMMGIEFNPRIGKWFDFKLFFNGRPGIVAWTLINLSFAAKQQELYGHVTNSMVLVNVLQAIYVLDFFWNETWYLKTMDICHDHFGWYLGWGDCVWLPYLYTLQGLYLVYHPVQLSPAHATGVLLLGLLGYYIFRMANHQKDLFRRTDGRCLIWGRKPKAIECSYVSADGQKHHSKLLVSGFWGLARHFNYTGDLMGSLAYCLACGGGHLLPYFYIIYMAILLIHRCLRDEHRCASKYGKDWERYIAAVPYRLLPGLF

SEQ ID NO: 10 - DNA, 1428 bp, Otolemur garnetti
atggccgccaagtctcaaccatctactccaaaaactaaatctccaggttctgtttccaacggtcaaactacttcccaaggtcaatggggtagagcttgggaagttgattggttctccttggcctccgtcatcttcttgttgttgttcgccccattcattgtctactactttatcatgacttgtgaccaatactcttgtgctttgactgctccagttgttgacattgtcactggtagaggtagattgtccgacatctgggccagaaccccatctgttaccgtcaaggccgctcaagtctacgccttgtgggttaccttccaagttttgttgtacatgtggttgccagacttttgtcacaagttcttgccaggttacgttggtggtatccaagaaggtgccgttactccagctggtgttgtcaacaagtacggtattaacggtttgcaagcctggttgatcactcacttgttgtggtttgccaactctcacttgttgttctggttctccccaactattattttcgacaactggattccattgttgtggtgtgctaacatcttgggttacgctgtctctaccttcgctatgatcaagggttacttctttccaacctctgctcaagactgtaaattcactggtaacttcttctacaactacatgatgggtattgaatttaacccaagaattggtaagtggttcgattttaagttgtttttcaacggtagaccaggtattgtcgcttggactttgatcaacttgtctttcgccgctaaacaacaagaattgtacggtcacgttactaactccatggttttggtcaacgtcttgcaagccatctacgttttggatttcttctggaacgaaacttggtacttgaagaccatggatatttgtcacgaccacttcggttggtacttgggttggggtgattgtgtttggttgccatacttgtacactttgcaaggtttgtacttggtctaccacccagtccaattgtccccagctcacgccactggtgttttgttgttgggtttgttgggttactacattttcagaatggctaaccaccaaaaggatttgttcagaagaaccgacggtagatgtttgatctggggtagaaaaccaaaggctatcgaatgttcttacgtctccgctgacggtcaaaagcatcactctaaattgttggtttccggtttctggggtttggctagacacttcaactacaccggtgacttgatgggttctttggcttactgtttggcctgtggtggtggtcacttgttgccatacttctacatcatttacatggctatcttgttgatccacagatgtttgagagacgaacacagatgtgcttctaagtacggtaaggactgggaaagatacattgccgctgttccatacagattgttgccaggtttgttttaa

SEQ ID NO: 11 - protein, 471 aa, Rattus norvegicus
MASKSQHNASKAKNHNVKAESQGQWGRAWEVDWFSLVSVIFLLLFAPFIVYYFIMACDQYSCSLTAPILDVATGRASLADIWAKTPPVTAKAAQLYALWVSFQVLLYSWLPDFCHRFLPGYVGGVQEGAITPAGIVNKYEVNGLQAWLITHFLWFVNAYLLSWFSPTIIFDNWIPLLWCANILGYAVSTFAMIKGYLFPTSAEDCKFTGNFFYNYMMGIEFNPRIGKWFDFKLFFNGRPGIVAWTLINLSFAAKQQELYGHVTNSMILVNVLQAIYVLDFFWNETWYLKTIDICHDHFGWYLGWGDCVWLPYLYTLQGLYLVYHPVQLSTPNALGVLLLGLVGYYIFRMTNHQKDLFRRTDGHCLIWGKKPKAIECSYTSADGLKHRSKLLVSGFWGVARHFNYTGDLMGSLAYCLACGGGHLLPYFYIIYMTILLTHRCLRDEHRCANKYGRDWERYVAAVPYRLLPGIF

SEQ ID NO: 12 - DNA, 1416 bp, Rattus norvegicus
atggcttctaaatcccaacataacgcttctaaggctaagaaccacaacgtcaaggctgaatcccaaggtcaatggggtagagcctgggaagttgactggttctctttggtttccgttattttcttgttgttgttcgctccattcatcgtttactacttcattatggcctgtgatcaatactcttgttctttgaccgccccaatcttggacgttgctactggtagagcttctttggctgatatctgggctaagaccccaccagttactgctaaagccgctcaattgtacgctttgtgggtctctttccaagttttgttgtactcttggttgccagacttctgtcacagattcttgccaggttacgtcggtggtgttcaagaaggtgctattaccccagccggtatcgtcaacaagtacgaagtcaacggtttgcaagcctggttgatcactcacttcttgtggttcgtcaacgcttacttgttgtcttggttctctccaaccatcatcttcgataactggattccattgttgtggtgtgctaacatcttgggttacgctgtctctacctttgccatgattaagggttacttgttcccaacttctgccgaagactgtaagttcactggtaacttcttttacaactacatgatgggtatcgaatttaacccaagaattggtaagtggtttgactttaagttgttcttcaacggtagaccaggtatcgtcgcttggactttgattaacttgtccttcgccgctaaacaacaagaattgtacggtcacgttaccaactccatgatcttggtcaacgtcttgcaagctatttacgttttggacttcttctggaacgaaacctggtacttgaagaccatcgacatctgtcacgaccacttcggttggtacttgggttggggtgactgtgtttggttgccatacttgtacactttgcaaggtttgtacttggtttaccacccagtccaattgtctactccaaacgccttgggtgtcttgttgttgggtttggttggttactacattttcagaatgactaaccaccaaaaggacttgttcagaagaaccgacggtcactgtttgatctggggtaagaagccaaaagctattgaatgttcctacacttctgctgatggtttgaagcacagatccaagttgttggtttctggtttctggggtgttgctagacacttcaactacactggtgacttgatgggttccttggcttactgtttggcctgtggtggtggtcacttgttgccatacttctacatcatttacatgactatcttgttgactcatagatgtttgagagacgaacatagatgtgctaacaaatacggtagagactgggaaagatacgtcgccgctgtcccatacagattgttgccaggtatcttctaa

SEQ ID NO: 13 - protein, 516 aa, Ailuropoda melanoleuca
MEPAVSLAVCALLFLLWVRVKGLEFVLIHQRWVFVCLFLLPLSLIFDIYYYVRAWVVFKLSSAPRLHGQRVRDIQKQVREWKEQGSKTFMCTGRPGWLTVSLRVGKYKKTHKNIMINLMDILEVDTKKQIVRVEPLVTMGQVTALLTSIGWTLPVLPELDDLTVGGLIMGTGIESSSHKYGLFQHICTAYELVLADGSFVRCTPSENSDLFYAVPWSCGTLGFLVAAEIRIIPAKKYVKLRFEPVWGLEAICEKFTRESQRPENDFVEGLLYSLDKAVIMTGVMTDEAEPSKLNSIGNYYKPWFFKHVERYLKTSREGLEYIPLRHYYHRHTRSIFWELQDIIPFGNNPVFRYLFGWMVPPKISLLKLTQGETLRKLYEQHHVVQDMLVPMRCLSQAVHTFHNDIHVYPIWLCPFILPSQPGLVHPKGDETELYVDIGAYGEPRVKHFEARSCMRQLEKFVRSVHGFQMLYADCYMSREEFWEMFDGSLYHRLRERLGCQDAFPEVYDKICKAARH

SEQ ID NO: 14 - DNA, 1551 bp, Ailuropoda melanoleuca
atggagcccgcggtgtcgctggccgtgtgcgcgctgctcttcctgctctgggtccgcgtgaaggggctggagttcgtgctcatccaccagcgctgggtgttcgtgtgcctcttcctcctgccgctctcgctgatcttcgacatctactactacgtgcgcgcctgggtggtgttcaagctcagcagcgcgcctcggctgcacgggcagcgcgtgcgggacatccagaagcaggtgcgggaatggaaggagcaggggagcaagactttcatgtgcacgggacgccctggctggctcactgtctcgctgcgggttgggaagtacaagaagacgcacaaaaacatcatgatcaacctgatggacattctggaggtggacaccaagaaacagattgtccgtgtggagcccttggtgactatgggtcaggtgactgccctgctgacctccattggctggacgctgcctgtgttgcccgagctcgatgacctcacagtggggggcttgatcatgggcacgggcatcgagtcatcgtcccacaagtacgggctgttccagcacatttgcactgcctacgagctggtcctggccgacggcagctttgtgcggtgcacgccgtcggaaaactcggacctgttctatgctgtgccgtggtcctgtgggaccctgggcttcctggtggccgccgagatccgcatcatccccgccaagaagtacgtcaagctgcggtttgagccagtgtggggcctggaggctatctgcgaaaagttcacccgtgagtcccagcggccggagaacgacttcgtggaagggctgctctactccctggataaggctgtcatcatgacgggggtcatgacagatgaggcagagcccagcaagctgaatagcattggcaactactacaagccctggttcttcaagcacgtggagcgctacctgaagacgagccgcgagggcctggagtacatccctctgagacactactaccaccgtcacacgcgcagcatcttctgggagctccaggacatcatcccctttggcaacaaccccgtcttccgctacctctttggttggatggtgccgcccaagatctccctgctgaagctgacccagggcgagaccctgcgcaagctgtacgagcagcaccacgtggtgcaggacatgctggtgcccatgaggtgcctgtcgcaggcggtgcacaccttccacaacgacatccacgtctaccccatctggctgtgcccattcatcctgcccagccagccgggcctggtgcaccccaagggagatgagaccgagctctacgtcgacattggagcatatggggagccacgcgtgaagcactttgaagcaaggtcctgcatgcggcagttggagaagtttgtccgaagcgtgcatgggttccagatgctgtatgccgactgctacatgagccgggaggagttctgggagatgttcgacggctccctgtaccacaggctgcgggagcggctcggttgccaggacgccttccccgaggtgtacgacaagatctgcaaggccgccaggcactga

SEQ ID NO: 15 - DNA, 1551 bp, Ailuropoda melanoleuca
atggaaccagctgtctccttggccgtctgtgctttgttgttcttgttgtgggtcagagtcaaaggtttggaatttgttttgatccaccaaagatgggtctttgtttgtttgttcttgttgccattgtctttgatcttcgacatttactactacgttagagcttgggttgtcttcaagttgtcctctgctccaagattgcatggtcaaagagttagagatattcaaaagcaagtcagagaatggaaggaacaaggttctaagacttttatgtgtactggtagaccaggttggttgactgtctctttgagagttggtaagtacaagaagactcacaagaacatcatgattaacttgatggacattttggaagttgataccaagaagcaaattgttagagttgaaccattggttactatgggtcaagttaccgctttgttgacctctatcggttggaccttgccagtcttgccagaattggatgacttgactgttggtggtttgattatgggtactggtatcgaatcttcttctcataagtacggtttgttccaacacatttgtaccgcttacgaattggtcttggctgatggttccttcgtcagatgtactccatccgaaaactctgatttgttctacgctgtcccatggtcttgtggtactttgggtttcttggtcgctgctgaaattagaatcatcccagccaagaagtacgtcaaattgagatttgaaccagtctggggtttggaagctatttgtgaaaagttcactagagaatctcaaagaccagaaaacgatttcgttgaaggtttgttgtactctttggacaaggctgtcattatgactggtgttatgactgatgaagctgaaccatctaagttgaactccatcggtaactactacaagccatggttctttaagcatgttgaaagatacttgaagacttccagagaaggtttggaatacatcccattgagacattactaccacagacacactagatccattttctgggaattgcaagacattatcccattcggtaacaacccagttttcagatacttgttcggttggatggttccaccaaagatttctttgttgaagttgactcaaggtgaaaccttgagaaagttgtacgaacaacatcacgttgttcaagatatgttggtcccaatgagatgtttgtcccaagctgttcataccttccataacgatattcatgtctacccaatctggttgtgtccattcatcttgccatcccaaccaggtttggtccatccaaaaggtgacgaaactgaattgtacgtcgatatcggtgcttacggtgaaccaagagttaagcattttgaagctagatcctgtatgagacaattggaaaagtttgtcagatccgtccacggtttccaaatgttgtacgctgactgttacatgtccagagaagaattctgggaaatgttcgacggttccttgtaccacagattgagagaaagattgggttgtcaagatgcttttccagaagtctacgacaagatttgtaaagctgccagacactaa

SEQ ID NO: 16 - DNA, 1551 bp, Ailuropoda melanoleuca
atggaaccagctgtttctttggctgtttgtgctttgttgtttttgttgtgggttagagttaaaggtttggaatttgttttgattcatcaaagatgggtttttgtttgtttgtttttgttgccattgtctttgatttttgatatttattattatgttagagcttgggttgtttttaaattgtcttctgctccaagattgcatggtcaaagagttagagatattcaaaaacaagttagagaatggaaagaacaaggttctaaaacttttatgtgtactggtagaccaggttggttgactgtttctttgagagttggtaaatataaaaaaactcataaaaatattatgattaatttgatggatattttggaagttgatactaaaaaacaaattgttagagttgaaccattggttactatgggtcaagttactgctttgttgacttctattggttggactttgccagttttgccagaattggatgatttgacagttggtggtttgattatgggtactggtattgaatcttcttctcataaatatggtttgtttcaacatatttgtactgcttatgaattggttttggctgatggttcttttgttagatgtactccatctgaaaattctgatttgttttatgctgttccatggtcttgtggtactttgggttttttggttgctgctgaaattagaattattccagctaaaaaatatgttaaattgagatttgaaccagtttggggtttggaagctatttgtgaaaaatttactagagaatctcaaagaccagaaaatgattttgttgaaggtttgttgtattctttggataaagctgttattatgactggtgttatgacagatgaagctgaaccatctaaattgaattctattggtaattattataaaccatggttttttaaacatgttgaaagatatttgaaaacttctagagaaggtttggaatatattccattgagacattattatcatagacatactagatctattttttgggaattgcaagatattattccatttggtaataatccagtttttagatatttgtttggttggatggttccaccaaaaatttctttgttgaaattgactcaaggtgaaactttgagaaaattgtatgaacaacatcatgttgttcaagatatgttggttccaatgagatgtttgtctcaagctgttcatacttttcataatgatattcatgtttatccaatttggttgtgtccatttattttgccatctcaaccaggtttggttcatccaaaaggtgatgaaactgaattgtatgttgatattggtgcttatggtgaaccaagagttaaacattttgaagctagatcttgtatgagacaattggaaaaatttgttagatctgttcatggttttcaaatgttgtatgctgattgttatatgtctagagaagaattttgggaaatgtttgatggttctttgtatcatagattgagagaaagattgggttgtcaagatgcttttccagaagtttatgataaaatttgtaaagctgctagacattaa

SEQ ID NO: 17 - protein, 561 aa, Arabidopsis thaliana
MSDLQTPLVRPKRKKTWVDYFVKFRWIIVIFIVLPFSATFYFLIYLGDMWSESKSFEKRQKEHDENVKKVIKRLKGRDASKDGLVCTARKPWIAVGMRNVDYKRARHFEVDLGEFRNILEINKEKMTARVEPLVNMGQISRATVPMNLSLAVVAELDDLTVGGLINGYGIEGSSHIYGLFADTVEAYEIVLAGGELVRATRDNEYSDLYYAIPWSQGTLGLLVAAEIRLIKVKEYMRLTYIPVKGDLQALAQGYIDSFAPKDGDKSKIPDFVEGMVYNPTEGVMMVGTYASKEEAKKKGNKINNVGWWFKPWFYQHAQTALKKGQFVEYIPTREYYHRHTRCLYWEGKLILPFGDQFWFRYLLGWLMPPKVSLLKATQGEAIRNYYHDMHVIQDMLVPLYKVGDALEWVHREMEVYPIWLCPHKLFKQPIKGQIYPEPGFEYENRQGDTEDAQMYTDVGVYYAPGCVLRGEEFDGSEAVRRMEKWLIENHGFQPQYAVSELDEKSFWRMFNGELYEECRKKYRAIGTFMSVYYKSKKGRKTEKEVREAEQAHLETAYAEAD

SEQ ID NO: 18 - DNA, 1686 bp, Arabidopsis thaliana
atgtcggatcttcagacaccgcttgtgaggcccaagaggaagaagacttgggttgattactttgtcaagttcagatggatcattgtcatcttcatcgtccttccattctcagccacattctacttcctcatctacctcggggacatgtggtcagagtccaagtcctttgagaaacgtcagaaggaacacgacgagaatgtcaagaaagtcatcaaaaggcttaagggtagggatgcttccaaggacgggcttgtctgcactgctcgtaagccctggatcgctgttggaatgaggaacgttgactacaagagagcccggcatttcgaggttgacttgggggagttccgtaacatccttgagatcaacaaggagaagatgactgctagagtggagcctcttgttaacatgggacagatttcccgtgctaccgtcccaatgaacctgtctctcgctgttgttgctgagcttgatgaccttaccgttggtggacttatcaatggatatggtattgaaggaagctctcacatctacggtttgtttgctgataccgttgaggcttacgagattgttcttgcgggtggagagcttgtccgcgccacaagggataatgagtattctgatctttactacgcaatcccgtggtcgcaaggaactcttggactccttgtagctgctgagatcaggcttattaaagtcaaggagtacatgagactcacttacataccagtcaagggtgatcttcaagccttagctcaaggttacattgattcttttgctcccaaagacggtgacaagtcgaaaatcccggatttcgtcgaaggcatggtttacaatccaacggaaggagtgatgatggttggaacatatgcatctaaagaagaggcaaagaagaaagggaacaaaatcaacaatgtgggatggtggttcaagccgtggttctaccagcacgcgcagaccgccctgaaaaagggacagtttgttgagtacatcccaactcgtgaatactaccacaggcacacaaggtgcttgtactgggaagggaagcttattcttccatttggtgatcagttctggtttaggtacctcttaggttggttgatgcctccaaaggtctctcttcttaaggccactcaaggtgaagctatcaggaactattaccatgatatgcatgttattcaggatatgcttgttcctctttacaaggttggcgatgcactcgaatgggtccaccgcgaaatggaggtgtatccaatttggctttgcccacacaaactcttcaagcagccaatcaaaggccaaatctacccagagccaggcttcgagtacgaaaacagacaaggagacacagaagatgcacagatgtacactgatgttggagtctactacgcacctggctgtgtcctaagaggtgaagagtttgatggatcagaagcagtgcgtaggatggagaaatggctgatagagaaccatggattccagcctcagtacgcggtgtctgagctcgacgagaagagcttctggagaatgtttaatggtgaattgtatgaggagtgccgcaagaagtatagagctattggaacgttcatgagtgtttactacaagtccaagaaaggaaggaagactgagaaagaagttagagaagccgaacaagctcatctcgaaactgcttatgccgaggcagattaa

SEQ ID NO: 19 - DNA, 1686 bp, Arabidopsis thaliana
atgtccgacttgcaaactccattggttagaccaaagagaaagaagacctgggttgactacttcgttaagtttagatggatcatcgtcatcttcatcgtcttgccattctccgctactttctacttcttgatctacttgggtgatatgtggtccgaatctaagtcttttgaaaagagacaaaaggaacacgatgaaaacgttaagaaggttatcaagagattgaaaggtagagacgcttccaaggacggtttggtctgtactgctagaaagccatggattgccgtcggtatgagaaacgttgattacaaaagagccagacactttgaagttgacttgggtgaatttagaaacatcttggaaatcaacaaggaaaagatgactgctagagtcgaaccattggtcaacatgggtcaaatctctagagctactgtcccaatgaacttgtccttggctgtcgttgctgaattggacgacttgaccgttggtggtttgatcaacggttacggtatcgaaggttcttctcatatttacggtttgttcgctgacaccgttgaagcctacgaaatcgtcttggccggtggtgaattggttagagctactagagataacgaatactctgacttgtactacgctattccatggtctcaaggtactttgggtttgttggttgctgctgaaatcagattgatcaaggttaaggaatacatgagattgacctacattccagtcaagggtgacttgcaagccttggctcaaggttacattgactctttcgctccaaaggatggtgacaaatctaagatcccagacttcgttgaaggtatggtctacaacccaaccgaaggtgttatgatggtcggtacttacgcttctaaagaagaagctaagaagaagggtaacaagatcaacaacgtcggttggtggttcaagccatggttctaccaacacgctcaaactgctttgaagaagggtcaatttgtcgaatacatcccaactagagaatactaccacagacacactagatgtttgtactgggaaggtaaattgattttgccattcggtgaccaattctggtttagatacttgttgggttggttgatgccaccaaaggtctctttgttgaaggccacccaaggtgaagctattagaaactactaccacgatatgcacgttatccaagatatgttggttccattgtacaaggttggtgatgctttggaatgggttcatagagaaatggaagtctacccaatctggttgtgtccacacaaattgttcaagcaaccaatcaagggtcaaatctacccagaaccaggttttgaatacgaaaacagacaaggtgacactgaagacgctcaaatgtacactgacgttggtgtttactacgctccaggttgtgttttgagaggtgaagaatttgatggttctgaagccgttagaagaatggaaaagtggttgatcgaaaaccatggttttcaaccacaatacgctgtttccgaattggatgaaaagtccttctggagaatgttcaacggtgaattgtacgaagaatgtagaaagaaatacagagccattggtacttttatgtctgtctactacaagtctaagaagggtagaaagaccgaaaaagaagtcagagaagccgaacaagctcacttggaaactgcctacgctgaagctgattag

SEQ ID NO: 20 - DNA, 1686 bp, Arabidopsis thaliana
atgtctgatttgcaaacaccattggttagaccaaaaagaaaaaaaacttgggttgattattttgttaaatttagatggattattgttatttttattgttttgccattttctgctacattttattttttgatttatttgggtgatatgtggtctgaatctaaatcttttgaaaaaagacaaaaagaacatgatgaaaatgttaaaaaagttattaaaagattgaaaggtagagatgcttctaaagatggtttggtttgtactgctagaaaaccatggattgctgttggtatgagaaatgttgattataaaagagctagacattttgaagttgatttgggtgaatttagaaatattttggaaattaataaagaaaaaatgactgctagagttgaaccattggttaatatgggtcaaatttctagagctactgttccaatgaatttgtctttggctgttgttgctgaattggatgatttgactgttggtggtttgattaatggttatggtattgaaggttcttctcatatttatggtttgtttgctgatactgttgaagcttatgaaattgttttggctggtggtgaattggttagagctacaagagataatgaatattctgatttgtattatgctattccatggtctcaaggtactttgggtttgttggttgctgctgaaattagattgattaaagttaaagaatatatgagattgacttatattccagttaaaggtgatttgcaagctttagctcaaggttatattgattcttttgctccaaaagatggtgataaatctaaaattccagattttgttgaaggtatggtttataatccaactgaaggtgttatgatggttggtacatatgcttctaaagaagaagctaaaaaaaaaggtaataaaattaataatgttggttggtggtttaaaccatggttttatcaacatgctcaaactgctttgaaaaaaggtcaatttgttgaatatattccaactagagaatattatcatagacatacaagatgtttgtattgggaaggtaaattgattttgccatttggtgatcaattttggtttagatatttgttaggttggttgatgccaccaaaagtttctttgttgaaagctactcaaggtgaagctattagaaattattatcatgatatgcatgttattcaagatatgttggttccattgtataaagttggtgatgctttggaatgggttcatagagaaatggaagtttatccaatttggttgtgtccacataaattgtttaaacaaccaattaaaggtcaaatttatccagaaccaggttttgaatatgaaaatagacaaggtgatacagaagatgctcaaatgtatactgatgttggtgtttattatgctccaggttgtgttttgagaggtgaagaatttgatggttctgaagctgttagaagaatggaaaaatggttgattgaaaatcatggttttcaaccacaatatgctgtttctgaattggatgaaaaatctttttggagaatgtttaatggtgaattgtatgaagaatgtagaaaaaaatatagagctattggtacttttatgtctgtttattataaatctaaaaaaggtagaaaaactgaaaaagaagttagagaagctgaacaagctcatttggaaactgcttatgctgaagctgattaa

SEQ ID NO: 21 - protein, 516 aa, Bos taurus
MEPAVSLAVCALLFLLWVRVKGLEFVLIHQRWVFVCLFLLPLSLIFDIYYYVRAWVVFKLSSAPRLHEQRVRDIQKQVREWKEQGSKTFMCTGRPGWLTVSLRVGKYKKTHKNIMINLMDILEVDTKKQIVRVEPLVTMGQVTALLTSIGWTLPVLPELDDLTVGGLIMGTGIESSSHRYGLFQHICTAYELVLADGSFVRCTPMENSDLFYAVPWSCGTLGFLVAAEIRIIPAKKYIKLRFEPVRGLEAICDKFTHESQQPENHFVEGLLYSLHEAVIMTGVMTDEAEPSKLNSIGNYYKPWFFKHVENYLKTNREGLEYIPLRHYYHRHTRSIFWELQDIIPFGNNPIFRYLFGWMVPPKISLLKLTQGETLRKLYEQHHVVQDMLVPMKCLPQALHTFHNDIHVYPIWLCPFILPSQPGLVHPKGDEAELYVDIGAYGEPRVKHFEARSCMRQLEKFVRSVHGFQMLYADCYMDREEFWEMFDGSLYHRLRKQLGCQDAFPEVYDKICKAARH

SEQ ID NO: 22 - DNA, 1551 bp, Bos taurus
atggagcccgctgtgtcgctggccgtgtgcgcgctgctcttcctgctctgggttcgggtgaaggggctggagttcgttctcatccaccagcgctgggtgtttgtgtgcctcttcctcctacctctctcgctcatcttcgacatctactactacgtgcgcgcctgggtggtgttcaagctcagcagcgcaccgcggctgcacgaacagcgcgtgcgggacatccagaaacaggtgcgggaatggaaggagcagggcagcaagaccttcatgtgcacggggcgacctggctggctcactgtttcactgcgggttgggaagtacaagaagacacacaaaaacataatgatcaacctgatggacattctggaggtggacaccaagaaacagattgtccgagtggagcccttggtgaccatgggtcaggtgactgccctgctgacctccattggctggactctgcctgtgttgcccgagctggatgacctcacagtgggaggactgatcatgggcacaggcatcgagtcttcgtcccataggtatggcttgttccagcacatctgcaccgcctatgagctggtcttggctgatggcagctttgtgcgatgtacaccgatggaaaactcagacctgttctacgctgtgccctggtcctgcgggactctgggcttcctggtggctgccgagatccgcatcatccctgccaagaagtacatcaagctgcggtttgagccggtgcgcggcctggaggccatctgtgacaagttcacccacgagtcccagcagccggagaaccacttcgtggaagggctgctctactctctgcacgaggccgtcatcatgacgggggtcatgacggacgaggcagagcccagcaagctgaacagcattggcaactactacaagccctggttcttcaagcacgtggagaactacctgaagacaaaccgagagggcctggagtacatccccttgagacactactatcaccgccacacgcgcagcatcttctgggagctccaggacatcatcccctttggcaacaaccccatcttccgctacctctttggttggatggtgcctcccaagatctccctgctgaagctgacccagggcgagacgctgcgcaagctgtacgagcagcaccacgtggtacaggacatgctggtgcccatgaagtgcctgccgcaggccctgcacaccttccacaacgacatccacgtctaccccatctggctgtgcccattcatcctgcccagccagccgggcctggtgcaccccaagggagatgaggccgagctctatgtcgatatcggtgcctacggggagccacgtgtgaagcattttgaagcccggtcctgcatgaggcagttggagaagtttgtccgaagtgtgcacgggttccagatgctgtatgccgactgctacatggaccgggaggagttctgggagatgttcgacggctccctgtaccacaggctgcggaagcagctcggctgccaggatgccttccctgaggtctacgacaagatctgcaaggctgccaggcactga

SEQ ID NO: 23 - DNA, 1551 bp, Bos taurus
atggaaccagctgtttccttggctgtctgtgctttgttgtttttgttgtgggttagagtcaaaggtttggaatttgttttgattcaccaaagatgggtcttcgtctgtttgttcttgttgccattgtccttgattttcgatatttactactacgttagagcttgggttgtcttcaagttgtcttccgctccaagattgcacgaacaaagagtcagagacattcaaaagcaagtcagagaatggaaggaacaaggttctaagactttcatgtgtactggtagaccaggttggttgactgtttctttgagagttggtaagtacaagaagacccacaagaacattatgatcaacttgatggacattttggaagttgacactaagaaacaaattgttagagtcgaaccattggttaccatgggtcaagttactgctttgttgacttctatcggttggactttgccagtcttgccagaattggatgacttgaccgttggtggtttgattatgggtactggtattgaatcttcttctcacagatacggtttgtttcaacacatctgtaccgcttacgaattggtcttggctgatggttctttcgtcagatgtactccaatggaaaactctgacttgttctacgctgttccatggtcttgtggtactttgggtttcttggttgccgctgaaatcagaattattccagccaagaagtacatcaagttgagatttgaaccagttagaggtttggaagccatctgtgacaaattcacccacgaatctcaacaaccagaaaaccactttgtcgaaggtttgttgtactctttgcatgaagctgtcattatgactggtgtcatgactgatgaagccgaaccatccaaattgaactctattggtaactactacaagccatggttctttaagcacgtcgaaaactacttgaagactaacagagaaggtttggaatacatcccattgagacattactaccacagacacactagatccatcttctgggaattgcaagacatcatcccatttggtaacaacccaatttttagatacttgttcggttggatggtcccaccaaagatttctttgttgaagttgacccaaggtgaaactttgagaaagttgtacgaacaacaccatgtcgtccaagatatgttggtcccaatgaagtgtttgccacaagccttgcacaccttccataacgatattcatgtctacccaatttggttgtgtccattcatcttgccatctcaaccaggtttggttcatccaaaaggtgacgaagccgaattgtacgtcgatattggtgcttacggtgaaccaagagttaagcactttgaagctagatcttgtatgagacaattggaaaagttcgttagatccgtccacggtttccaaatgttgtacgctgactgttacatggatagagaagaattttgggaaatgttcgatggttctttgtaccacagattgagaaagcaattgggttgtcaagatgcctttccagaagtttacgacaagatttgtaaggctgctagacactaa

SEQ ID NO: 24 - DNA, 1551 bp, Bos taurus
atggaaccagctgtttctttggctgtttgtgctttgttgtttttgttgtgggttagagttaaaggtttggaatttgttttgattcatcaaagatgggtttttgtttgtttgtttttgttgccattgtctttgatttttgatatttattattatgttagagcttgggttgtttttaaattgtcttctgctccaagattgcatgaacaaagagttagagatattcaaaaacaagttagagaatggaaagaacaaggttctaaaacttttatgtgtactggtagaccaggttggttgactgtttctttgagagttggtaaatataaaaaaacacataaaaatattatgattaatttgatggatattttggaagttgatactaaaaaacaaattgttagagttgaaccattggttactatgggtcaagttactgctttgttgacttctattggttggactttgccagttttgccagaattggatgatttgacagttggtggtttgattatgggtacaggtattgaatcttcttctcatagatatggtttgtttcaacatatttgtactgcttatgaattggttttggctgatggttcttttgttagatgtacaccaatggaaaattctgatttgttttatgctgttccatggtcttgtggtactttgggttttttggttgctgctgaaattagaattattccagctaaaaaatatattaaattgagatttgaaccagttagaggtttggaagctatttgtgataaatttactcatgaatctcaacaaccagaaaatcattttgttgaaggtttgttgtattctttgcatgaagctgttattatgactggtgttatgactgatgaagctgaaccatctaaattgaattctattggtaattattataaaccatggttttttaaacatgttgaaaattatttgaaaacaaatagagaaggtttggaatatattccattgagacattattatcatagacatactagatctattttttgggaattgcaagatattattccatttggtaataatccaatttttagatatttgtttggttggatggttccaccaaaaatttctttgttgaaattgactcaaggtgaaactttgagaaaattgtatgaacaacatcatgttgttcaagatatgttggttccaatgaaatgtttgccacaagctttgcatacttttcataatgatattcatgtttatccaatttggttgtgtccatttattttgccatctcaaccaggtttggttcatccaaaaggtgatgaagctgaattgtatgttgatattggtgcttatggtgaaccaagagttaaacattttgaagctagatcttgtatgagacaattggaaaaatttgttagatctgttcatggttttcaaatgttgtatgctgattgttatatggatagagaagaattttgggaaatgtttgatggttctttgtatcatagattgagaaaacaattgggttgtcaagatgcttttccagaagtttatgataaaatttgtaaagctgctagacattaa

SEQ ID NO: 25 - protein, 516 aa, Homo sapiens
MEPAVSLAVCALLFLLWVRLKGLEFVLIHQRWVFVCLFLLPLSLIFDIYYYVRAWVVFKLSSAPRLHEQRVRDIQKQVREWKEQGSKTFMCTGRPGWLTVSLRVGKYKKTHKNIMINLMDILEVDTKKQIVRVEPLVTMGQVTALLTSIGWTLPVLPELDDLTVGGLIMGTGIESSSHKYGLFQHICTAYELVLADGSFVRCTPSENSDLFYAVPWSCGTLGFLVAAEIRIIPAKKYVKLRFEPVRGLEAICAKFTHESQRQENHFVEGLLYSLDEAVIMTGVMTDEAEPSKLNSIGNYYKPWFFKHVENYLKTNREGLEYIPLRHYYHRHTRSIFWELQDIIPFGNNPIFRYLFGWMVPPKISLLKLTQGETLRKLYEQHHVVQDMLVPMKCLQQALHTFQNDIHVYPIWLCPFILPSQPGLVHPKGNEAELYIDIGAYGEPRVKHFEARSCMRQLEKFVRSVHGFQMLYADCYMNREEFWEMFDGSLYHKLREKLGCQDAFPEVYDKICKAARH

SEQ ID NO: 26 - DNA, 1551 bp, Homo sapiens
atggagcccgccgtgtcgctggccgtgtgcgcgctgctcttcctgctgtgggtgcgcctgaaggggctggagttcgtgctcatccaccagcgctgggtgttcgtgtgcctcttcctcctgccgctctcgcttatcttcgatatctactactacgtgcgcgcctgggtggtgttcaagctcagcagcgctccgcgcctgcacgagcagcgcgtgcgggacatccagaagcaggtgcgggaatggaaggagcagggtagcaagaccttcatgtgcacggggcgccctggctggctcactgtctcactacgtgtcgggaagtacaagaagacacacaaaaacatcatgatcaacctgatggacattctggaagtggacaccaagaaacagattgtccgtgtggagcccttggtgaccatgggccaggtgactgccctgctgacctccattggctggactctccccgtgttgcctgagcttgatgacctcacagtggggggcttgatcatgggcacaggcatcgagtcatcatcccacaagtacggcctgttccaacacatctgcactgcttacgagctggtcctggctgatggcagctttgtgcgatgcactccgtccgaaaactcagacctgttctatgccgtaccctggtcctgtgggacgctgggtttcctggtggccgctgagatccgcatcatccctgccaagaagtacgtcaagctgcgtttcgagccagtgcggggcctggaggctatctgtgccaagttcacccacgagtcccagcggcaggagaaccacttcgtggaagggctgctctactccctggatgaggctgtcattatgacaggggtcatgacagatgaggcagagcccagcaagctgaatagcattggcaattactacaagccgtggttctttaagcatgtggagaactatctgaagacaaaccgagagggcctggagtacattcccttgagacactactaccaccgccacacgcgcagcatcttctgggagctccaggacattatcccctttggcaacaaccccatcttccgctacctctttggctggatggtgcctcccaagatctccctcctgaagctgacccagggtgagaccctgcgcaagctgtacgagcagcaccacgtggtgcaggacatgctggtgcccatgaagtgcctgcagcaggccctgcacaccttccaaaacgacatccacgtctaccccatctggctgtgtccgttcatcctgcccagccagccaggcctagtgcaccccaaaggaaatgaggcagagctctacatcgacattggagcatatggggagccgcgtgtgaaacactttgaagccaggtcctgcatgaggcagctggagaagtttgtccgcagcgtgcatggcttccagatgctgtatgccgactgctacatgaaccgggaggagttctgggagatgtttgatggctccttgtaccacaagctgcgagagaagctgggttgccaggacgccttccccgaggtgtacgacaagatctgcaaggccgccaggcactga

SEQ ID NO: 27 - DNA, 1551 bp, Homo sapiens
atggaaccagctgtctctttggctgtttgtgctttgttgttcttgttgtgggttagattgaaaggtttggaatttgttttgatccaccaaagatgggtcttcgtttgtttgttcttgttgccattgtccttgatcttcgatatctactactacgttagagcttgggttgttttcaagttgtcttctgctccaagattgcacgaacaaagagttagagacattcaaaagcaagttagagaatggaaggaacaaggttccaagactttcatgtgtaccggtagaccaggttggttgaccgtttctttgagagtcggtaagtacaaaaagactcacaagaacatcatgatcaacttgatggacattttggaagttgatactaagaagcaaatcgttagagtcgaaccattggttaccatgggtcaagttactgctttgttgacctctattggttggaccttgccagttttgccagaattggacgatttgactgttggtggtttgattatgggtactggtatcgaatcttcctctcataagtacggtttgttccaacacatttgtaccgcctacgaattggttttggccgatggttcttttgtcagatgtaccccatccgaaaactctgacttgttttacgctgtcccatggtcttgtggtactttgggtttcttggttgctgctgaaatcagaatcattccagctaagaagtacgtcaagttgagatttgaaccagtcagaggtttggaagctatttgtgctaagttcactcacgaatctcaaagacaagaaaaccacttcgttgaaggtttgttgtactccttggacgaagctgttatcatgaccggtgttatgactgatgaagctgaaccatctaagttgaactctatcggtaactactacaagccatggttcttcaagcatgtcgaaaactacttgaagactaacagagaaggtttggaatacattccattgagacattactaccatagacacactagatctattttctgggaattgcaagatatcatcccatttggtaacaacccaattttcagatacttgttcggttggatggttccaccaaagatctctttgttgaagttgactcaaggtgaaaccttgagaaagttgtacgaacaacaccacgtcgttcaagacatgttggtcccaatgaagtgtttgcaacaagccttgcatacctttcaaaacgatattcatgtctacccaatctggttgtgtccattcatcttgccatctcaaccaggtttggttcatccaaaaggtaacgaagctgaattgtacattgatatcggtgcttacggtgaaccaagagttaagcattttgaagctagatcttgtatgagacaattggaaaagttcgtcagatccgtccatggtttccaaatgttgtacgccgactgttacatgaacagagaagaattttgggaaatgttcgacggttccttgtaccacaagttgagagaaaagttgggttgtcaagatgcttttccagaagtttacgacaagatctgtaaggccgctagacactaa

SEQ ID NO: 28 - DNA, 1551 bp, Homo sapiens
atggaaccagctgtttctttggctgtttgtgctttgttgtttttgttgtgggttagattgaaaggtttggaatttgttttgattcatcaaagatgggtttttgtttgtttgtttttgttgccattgtctttgatttttgatatttattattatgttagagcttgggttgtttttaaattgtcttctgctccaagattgcatgaacaaagagttagagatattcaaaaacaagttagagaatggaaagaacaaggttctaaaacttttatgtgtactggtagaccaggttggttgactgtttctttgagagttggtaaatataaaaaaacacataaaaatattatgattaatttgatggatattttggaagttgatactaaaaaacaaattgttagagttgaaccattggttactatgggtcaagttactgctttgttgacttctattggttggactttgccagttttgccagaattggatgatttgacagttggtggtttgattatgggtacaggtattgaatcttcttctcataaatatggtttgtttcaacatatttgtactgcttatgaattggttttggctgatggttcttttgttagatgtactccatctgaaaattctgatttgttttatgctgttccatggtcttgtggtactttgggttttttggttgctgctgaaattagaattattccagctaaaaaatatgttaaattgagatttgaaccagttagaggtttggaagctatttgtgctaaatttactcatgaatctcaaagacaagaaaatcattttgttgaaggtttgttgtattctttggatgaagctgttattatgacaggtgttatgacagatgaagctgaaccatctaaattgaattctattggtaattattataaaccatggttttttaaacatgttgaaaattatttgaaaacaaatagagaaggtttggaatatattccattgagacattattatcatagacatactagatctattttttgggaattgcaagatattattccatttggtaataatccaatttttagatatttgtttggttggatggttccaccaaaaatttctttgttgaaattgactcaaggtgaaactttgagaaaattgtatgaacaacatcatgttgttcaagatatgttggttccaatgaaatgtttgcaacaagctttgcatacttttcaaaatgatattcatgtttatccaatttggttgtgtccatttattttgccatctcaaccaggtttggttcatccaaaaggtaatgaagctgaattgtatattgatattggtgcttatggtgaaccaagagttaaacattttgaagctagatcttgtatgagacaattggaaaaatttgttagatctgttcatggttttcaaatgttgtatgctgattgttatatgaatagagaagaattttgggaaatgtttgatggttctttgtatcataaattgagagaaaaattgggttgtcaagatgcttttccagaagtttatgataaaatttgtaaagctgctagacattaa

SEQ ID NO: 29 - protein, 516 aa, Loxodonta africana
MEPAVSLAVCALLFLLWIRVKGLEFVLIHQRWVFVCLFLLPLSLIFDICYYVRAWVVFKLSSAPRLHEQRVRDIQKQVREWKEQGSKTFMCTGRPGWLTISLRVGKYKKIHKNIMINLMDILEVDTKKQIVRVEPLVTMGQVTALLTSIGWTLPVLPELDDLTVGGLIMGTGIESSSHKYGLFQHICTAYELVLADGSFVRCTPSENSDLFYAVPWSCGTLGFLVTAEIRIIPAKKYVKLRFEPVRGLENICDKFSRESQQLENHFVEGLLYSLDEAVIMTGVMTDEAEPSKLNSIGNYYKPWFFKHVENYLKTNQEGLEYVPLRHYYHRHTRSIFWELQDIIPFGNNPIFRYLFGWMVPPKISLLKLTQGETLRKLYEQHHVVQDMLVPMKCMPQALHTFHNDIHVYPIWLCPFILPSQPGLVHPKGDEAELYVDIGAYGEPRIKHFEARSCMRQLEKFVRSVHGFQMLYADCYMNREEFWEMFDGSLYHKLREQLNCQDAFPEVYDKICKAARH

SEQ ID NO: 30 - DNA, 1551 bp, Loxodonta africana
atggagcccgctgtgtccctggccgtgtgcgcgctgctcttcctgctctggatccgtgtgaaggggctggagttcgtgctcatccatcagcgctgggtgttcgtgtgcctcttcctcctgccactgtcgctaatcttcgacatctgctactacgtgcgcgcctgggtggtgttcaagctcagcagcgcgccgcggctgcacgagcagcgcgtgcgggacatccagaagcaggtacgagaatggaaggagcagggcagcaagacgttcatgtgcaccgggcgccctggctggctcaccatctcactgcgggttgggaagtacaagaagatacacaaaaacatcatgatcaacctgatggacattctggaggtggacaccaagaaacagattgtccgtgtggagcccttggtgaccatgggtcaggtgactgccctgctgacttccattggctggactctgcctgtgttgcccgagctcgatgacctcaccgtagggggcttgatcatgggcactggcatcgagtcgtcatcccacaagtatggtctgttccagcacatctgtacagcctatgagctggtcctagctgatggcagctttgtgcgatgtacgccgtctgaaaactcagatctgttctatgctgtgccctggtcctgtgggacactgggcttcctggtgaccgctgagatccgcatcatccctgccaagaagtacgtcaagctgcgctttgagccagtacggggcctggagaatatctgtgacaagttctcccgcgagtctcagcagctggagaaccacttcgtggaagggctgctatactccctggatgaggccgtcatcatgacaggcgtcatgacagacgaagcagagcccagcaagctgaatagcattgggaattactacaagccatggttcttcaagcacgtggagaactacctgaagacaaaccaagagggcctggagtacgttcccctgaggcactactatcaccgccacacccgcagcatcttctgggagctccaggacatcatccccttcggcaacaaccccattttccgctacctctttggttggatggtacctcctaagatctccctcctgaagctgacccagggcgagaccctgcgcaagctgtatgagcagcaccacgtggtgcaggacatgctggtgcccatgaagtgcatgccgcaggccctgcacaccttccacaacgacatccacgtctaccccatctggctgtgccccttcatcctgcccagccagccaggcctggtgcaccccaaaggagatgaggcagagctctacgtcgacattggggcctatggggagccacgcataaagcactttgaagccaggtcctgcatgaggcagttggagaagttcgttcgaagcgtgcatggattccagatgctgtatgccgattgctacatgaaccgggaggagttctgggagatgtttgacggatccctgtaccacaagctgcgggagcagctcaactgccaggacgccttcccagaggtgtatgacaagatctgcaaggccgccaggcactga

SEQ ID NO: 31 - DNA, 1551 bp, Loxodonta africana
atggaaccagctgtctctttggccgtttgtgctttgttgtttttgttgtggattagagtcaaaggtttggaatttgtcttgattcaccaaagatgggtcttcgtttgtttgtttttgttgccattgtccttgattttcgacatctgttactacgttagagcttgggtcgtttttaagttgtcttctgctccaagattgcatgaacaaagagttagagacattcaaaagcaagtcagagaatggaaggaacaaggttctaagactttcatgtgtactggtagaccaggttggttgactatctccttgagagttggtaagtacaagaaaattcacaagaacattatgattaacttgatggatattttggaagttgacactaagaagcaaattgtcagagtcgaaccattggttactatgggtcaagtcactgctttgttgacctccattggttggaccttgccagttttgccagaattggatgacttgaccgttggtggtttgattatgggtactggtattgaatcctcctctcataaatacggtttgttccaacacatctgtactgcctacgaattggttttggctgatggttccttcgttagatgtaccccatccgaaaactctgatttgttctacgccgtcccatggtcttgtggtactttgggttttttggttactgctgaaattagaattattccagccaagaagtacgttaagttgagatttgaaccagtcagaggtttggaaaacatttgtgataagttttctagagaatctcaacaattggaaaaccacttcgttgaaggtttgttgtactctttggatgaagccgtcatcatgaccggtgttatgaccgacgaagccgaaccatccaagttgaactccatcggtaactactacaagccatggttcttcaagcacgttgaaaactacttgaagactaaccaagaaggtttggaatacgtcccattgagacactactaccatagacatactagatctatcttctgggaattgcaagacattattccattcggtaacaacccaattttcagatacttgtttggttggatggttccaccaaagatctctttgttgaagttgactcaaggtgaaactttgagaaagttgtacgaacaacaccacgtcgttcaagatatgttggtcccaatgaagtgtatgccacaagccttgcacaccttccacaacgacattcacgtctacccaatctggttgtgtccattcattttgccatctcaaccaggtttggttcatccaaaaggtgacgaagctgaattgtacgttgatatcggtgcctacggtgaaccaagaatcaagcactttgaagctagatcctgtatgagacaattggaaaagtttgttagatctgttcacggttttcaaatgttgtacgccgattgttacatgaacagagaagaattctgggaaatgtttgacggttctttgtaccataagttgagagaacaattgaactgtcaagatgcctttccagaagtttacgataagatctgtaaggctgctagacactaa

SEQ ID NO: 32 - DNA, 1551 bp, Loxodonta africana
atggaaccagctgtttctttggctgtttgtgctttgttgtttttgttgtggattagagttaaaggtttggaatttgttttgattcatcaaagatgggtttttgtttgtttgtttttgttgccattgtctttgatttttgatatttgttattatgttagagcttgggttgtttttaaattgtcttctgctccaagattgcatgaacaaagagttagagatattcaaaaacaagttagagaatggaaagaacaaggttctaaaacttttatgtgtactggtagaccaggttggttgactatttctttgagagttggtaaatataaaaaaattcataaaaatattatgattaatttgatggatattttggaagttgatactaaaaaacaaattgttagagttgaaccattggttactatgggtcaagttactgctttgttgacttctattggttggactttgccagttttgccagaattggatgatttgactgttggtggtttgattatgggtactggtattgaatcttcttctcataaatatggtttgtttcaacatatttgtacagcttatgaattggttttggctgatggttcttttgttagatgtactccatctgaaaattctgatttgttttatgctgttccatggtcttgtggtacattgggttttttggttactgctgaaattagaattattccagctaaaaaatatgttaaattgagatttgaaccagttagaggtttggaaaatatttgtgataaattttctagagaatctcaacaattggaaaatcattttgttgaaggtttgttgtattctttggatgaagctgttattatgacaggtgttatgacagatgaagctgaaccatctaaattgaattctattggtaattattataaaccatggttttttaaacatgttgaaaattatttgaaaacaaatcaagaaggtttggaatatgttccattgagacattattatcatagacatactagatctattttttgggaattgcaagatattattccatttggtaataatccaatttttagatatttgtttggttggatggttccaccaaaaatttctttgttgaaattgactcaaggtgaaactttgagaaaattgtatgaacaacatcatgttgttcaagatatgttggttccaatgaaatgtatgccacaagctttgcatacttttcataatgatattcatgtttatccaatttggttgtgtccatttattttgccatctcaaccaggtttggttcatccaaaaggtgatgaagctgaattgtatgttgatattggtgcttatggtgaaccaagaattaaacattttgaagctagatcttgtatgagacaattggaaaaatttgttagatctgttcatggttttcaaatgttgtatgctgattgttatatgaatagagaagaattttgggaaatgtttgatggttctttgtatcataaattgagagaacaattgaattgtcaagatgcttttccagaagtttatgataaaatttgtaaagctgctagacattaa

SEQ ID NO: 33 - protein, 518 aa, Mus musculus
MEPAVSLAVCALLFLLWVRVKGLEFVLIHQRWVFVCLFLLPLSLIFDIYYYVRAWVVFKLSSAPRLHEQRVRDIQKQVREWKEQGSKTFMCTGRPGWLTVSLRVGKYKKTHKNIMINLMDILEVDTKKQIVRVEPLVSMGQVTALLNSIGWTLPVLPELDDLTVGGLIMGTGIESSSHKYGLFQHICTAYELILADGSFVRCTPSENSDLFYAVPWSCGTLGFLVAAEIRIIPAKKYVKLRFEPVRGLEAICEKFTRESQRLENHFVEGLLYSLDEAVAVIMTGVMTDDVESSKLNSIGSYYKPWFFKHVENYLKTNREGLEYIPLRHYYHRHTRSIFWELQDIIPFGNNPIFRYLFGWMVPPKISLLKLTQGETLRKLYEQHHVVQDMLVPMKCMSQALHTFQNDIHVYPIWLCPFILPSQPGLVHPKGDEAELYVDIGAYGEPRVKHFEARSCMRQLEKFVRSVHGFQMLYADCYMNREEFWEMFDGSLYHKLRKQLGCQDAFPEVYDKICKAARH

SEQ ID NO: 34 - DNA, 1557 bp, Mus musculus
atggagcccgccgtgtcgctggccgtgtgcgcgctgctctttctgctctgggtgcgagtgaaggggttggagttcgttctcatccaccagcgctgggtgttcgtgtgcctcttcttgctgccgctctcgctcatcttcgatatctactactacgtgcgcgcctgggtggtgttcaagctgagcagtgcgccgcgcctgcacgagcagcgcgtgcgggacatccagaaacaggtccgggaatggaaggaacagggcagtaagaccttcatgtgcacggggcgcccaggctggctcactgtctcgctgcgagtcggaaagtacaagaagacccataagaacatcatgatcaacctgatggacatcctggaggtggacaccaagaaacagattgttcgagtggagcccttggtgtctatgggtcaggtgacagctttgctgaactccattggctggaccctgcctgtgttgcctgagcttgatgacctcacagtggggggcctgatcatgggcacaggcatcgagtcatcgtcccacaagtatggcctgttccaacacatttgcactgcctacgagctgatcctggcagacggcagctttgtgcgctgcacaccgtctgaaaactcagacctgttctatgccgtgccctggtcctgtgggaccctgggcttcctggtggctgccgagatccggatcatcccggccaagaagtatgtcaagctgcggtttgagcctgttcggggcctggaggccatctgtgaaaaattcacccgcgagtcccagcggctggagaaccacttcgtggaagggttgctgtactccctggatgaggctgtggctgtcatcatgacaggggtcatgacggacgacgtagagtccagcaagctgaatagcattggcagttactacaagccctggttcttcaagcatgtggagaactacctgaagacaaaccgggagggcctcgaatacattcccctgagacactactaccaccgacacacgcgcagcatcttctgggagctccaggacatcatccctttcggcaacaaccccatcttccgctacctcttcggctggatggtgcctcccaagatctccctcctgaagctgacccagggcgagacgctacgcaagctgtacgagcagcaccacgtggtgcaggacatgctggtgcccatgaagtgcatgtcacaggccctgcataccttccaaaatgacatccacgtctaccccatctggctgtgcccattcatcctgcccagccagccaggactagtgcatcccaagggagatgaagcagagctctacgtggacatcggggcatacggggagccacgtgtgaagcacttcgaggccaggtcctgcatgaggcagctggagaagtttgtgcggagtgtgcacgggttccaaatgttatacgccgattgctatatgaaccgcgaggaattctgggagatgttcgatggctccttgtaccacaagctgcgcaagcagctgggctgccaggacgccttccctgaggtgtacgacaagatctgcaaggcggcaaggcactga

SEQ ID NO: 35 - DNA, 1557 bp, Mus musculus
atggaaccagctgtttccttggccgtttgtgctttgttgttcttgttgtgggtcagagttaaaggtttggaatttgttttgattcatcaaagatgggtcttcgtttgtttgttcttgttgccattgtccttgattttcgacatctactactacgttagagcttgggttgttttcaagttgtcttctgccccaagattgcacgaacaaagagttagagatatccaaaagcaagttagagaatggaaggaacaaggttctaagacttttatgtgtactggtagaccaggttggttgactgtttctttgagagtcggtaagtacaagaagacccataagaacatcatgattaacttgatggatattttggaagttgatactaagaagcaaatcgttagagttgaaccattggtttccatgggtcaagttaccgccttgttgaactctattggttggactttgccagttttgccagaattggacgacttgaccgttggtggtttgattatgggtactggtatcgaatcctcttctcacaaatacggtttgttccaacacatttgtaccgcctacgaattgattttggctgatggttctttcgtcagatgtaccccatctgaaaactccgacttgttttacgccgtcccatggtcttgtggtaccttgggtttcttggttgccgccgaaatcagaatcattccagccaagaagtacgtcaaattgagatttgaaccagttagaggtttggaagctatttgtgaaaaattcaccagagaatctcaaagattggaaaaccactttgtcgaaggtttgttgtactctttggatgaagctgttgccgttattatgactggtgtcatgaccgacgacgttgaatcttctaagttgaactctatcggttcctactacaagccatggttctttaagcacgtcgaaaactacttgaaaaccaacagagaaggtttggaatacatcccattgagacattactaccatagacacactagatctatcttctgggaattgcaagacatcatcccattcggtaacaacccaatcttcagatacttgttcggttggatggtcccaccaaagatctccttgttgaagttgactcaaggtgaaactttgagaaagttgtacgaacaacatcacgttgtccaagatatgttggttccaatgaagtgtatgtctcaagccttgcacaccttccaaaacgacatccacgtttacccaatttggttgtgtccattcatcttgccatctcaaccaggtttggttcatccaaaaggtgacgaagccgaattgtacgttgacattggtgcttacggtgaaccaagagttaaacactttgaagctagatcctgtatgagacaattggaaaagttcgttagatctgtccacggttttcaaatgttgtacgccgattgttacatgaacagagaagaattctgggaaatgttcgacggttccttgtaccacaagttgagaaaacaattgggttgtcaagatgcttttccagaagtttacgacaaaatctgtaaagccgctagacactaa

SEQ ID NO: 36 - DNA, 1557 bp, Mus musculus
atggaaccagctgtttctttggctgtttgtgctttgttgtttttgttgtgggttagagttaaaggtttggaatttgttttgattcatcaaagatgggtttttgtttgtttgtttttgttgccattgtctttgatttttgatatttattattatgttagagcttgggttgtttttaaattgtcttctgctccaagattgcatgaacaaagagttagagatattcaaaaacaagttagagaatggaaagaacaaggttctaaaacttttatgtgtactggtagaccaggttggttgactgtttctttgagagttggtaaatataaaaaaactcataaaaatattatgattaatttgatggatattttggaagttgatactaaaaaacaaattgttagagttgaaccattggtttctatgggtcaagttacagctttgttgaattctattggttggactttgccagttttgccagaattggatgatttgacagttggtggtttgattatgggtacaggtattgaatcttcttctcataaatatggtttgtttcaacatatttgtactgcttatgaattgattttggctgatggttcttttgttagatgtacaccatctgaaaattctgatttgttttatgctgttccatggtcttgtggtactttgggttttttggttgctgctgaaattagaattattccagctaaaaaatatgttaaattgagatttgaaccagttagaggtttggaagctatttgtgaaaaatttactagagaatctcaaagattggaaaatcattttgttgaaggtttgttgtattctttggatgaagctgttgctgttattatgacaggtgttatgactgatgatgttgaatcttctaaattgaattctattggttcttattataaaccatggttttttaaacatgttgaaaattatttgaaaacaaatagagaaggtttggaatatattccattgagacattattatcatagacatactagatctattttttgggaattgcaagatattattccatttggtaataatccaatttttagatatttgtttggttggatggttccaccaaaaatttctttgttgaaattgactcaaggtgaaactttgagaaaattgtatgaacaacatcatgttgttcaagatatgttggttccaatgaaatgtatgtctcaagctttgcatacttttcaaaatgatattcatgtttatccaatttggttgtgtccatttattttgccatctcaaccaggtttggttcatccaaaaggtgatgaagctgaattgtatgttgatattggtgcttatggtgaaccaagagttaaacattttgaagctagatcttgtatgagacaattggaaaaatttgttagatctgttcatggttttcaaatgttatatgctgattgttatatgaatagagaagaattttgggaaatgtttgatggttctttgtatcataaattgagaaaacaattgggttgtcaagatgcttttccagaagtttatgataaaatttgtaaagctgctagacattaa

SEQ ID NO: 37 - protein, 516 aa, Otolemur garnetti
MEPAVSLAVCALLFLLWVRLKGLEFVLIHQRWVFVCLFLLPLSLIFDIYYYVRAWVVFRLSSAPRLHEQRVRDIQKQVREWKEQGSKTFMCTGRPGWLTVSLRVGKYKKTHKNIMINLMDILEVDTKKQIVRVEPLVTMGQVTALLTSIGWTLPVLPELDDLTVGGLIMGTGIESSSHKYGLFQHICTAYELVLADGSFVRCTPTENSDLFYAVPWSCGTLGFLVAAEIRIIPAKKYVKLRFEPVRGLEAICDKFTHESQRLENHFVEGLLYSLDEAVIMTGVMTDEAEPSKLNSIGNYYKPWFFKHVENYLKTNQEGLEYIPLRHYYHRHTRSIFWELQDIIPFGNNPIFRYLFGWMVPPKISLLKLTQGETLRKLYEQHHVVQDMLVPMKCLPRALNTFHNDIHVYPIWLCPFILPSQPGLVHPKGDETELYVDIGAYGEPRVKHFEARSCMRQLEKFVRSVHGFQMLYADCYMNREEFWEMFDGSLYHELREKLGCQDAFPEVYDKICKAARH

SEQ ID NO: 38 - DNA, 1551 bp, Otolemur garnetti
atggagcccgccgtgtcgctggcggtgtgcgcgctgctcttcctgctctgggtgcgcttgaaggggctggagttcgtgctcatccaccagcgctgggtgttcgtatgcctcttcctcctgccgctctcgctcatcttcgacatctactactacgtgcgcgcctgggtggtgtttaggctcagcagcgcgccgcgcctgcacgagcagagagtgcgggacatccagaagcaggtgcgggaatggaaggagcagggcagcaagactttcatgtgcacgggacgccccggctggctcacggtctcgctgagggttgggaagtacaagaagacacacaaaaacattatgatcaacctgatggacattctggaggtggataccaagaaacagatagtccgtgtggagcccttggtgaccatgggtcaggtgactgccctgctgacctccattggttggaccctgcccgtgttgcccgagcttgatgacctcacagtagggggcttgatcatgggcacaggcatagagtcgtcatctcacaagtacggcctgttccaacacatctgcactgcctacgagctggtcctggccgacggcagctttgtgcggtgcacaccgactgaaaactcagacctgttctatgctgtgccttggtcctgtgggactctgggcttcctggtggctgccgagatccgcatcatccctgccaagaagtacgtcaagctacgatttgagccagtgcggggcctggaggccatctgtgacaagttcacccacgagtcccagcggctggagaaccactttgtggaagggctgctctactccctggacgaagccgtcatcatgacgggcgtcatgacagatgaggcagagcctagcaagctgaatagcattggcaattactacaagccgtggttcttcaagcacgtggagaattacctgaagaccaaccaggagggcctggagtacatccccttgagacactactaccaccgccacacgcgcagcatcttctgggagctccaggatatcatcccctttggcaacaaccccatcttccgctacctctttgggtggatggtaccgcccaagatctccctcctgaagctgacccagggcgagaccctgcgcaagctgtacgagcagcaccatgtggtgcaggacatgctggtgcccatgaagtgcctgccacgggccctgaacaccttccacaatgacatccacgtctacccgatctggctgtgtccgttcatcctgcccagccagccgggcctggtgcaccccaagggagacgagacagagctctatgttgacattggcgcatatggggagccacgcgtgaagcactttgaagccaggtcttgcatgaggcagttggagaagtttgtccgaagtgtgcatggcttccagatgctgtacgctgactgctacatgaaccgggaggagttctgggagatgtttgacggctccttgtaccacgagctgcgggagaagctcggttgccaggatgccttccctgaggtgtacgacaagatctgcaaggccgccaggcactga

SEQ ID NO: 39 - DNA, 1551 bp, Otolemur garnetti
atggaaccagctgtttctttggctgtttgtgctttgttgtttttgttgtgggtcagattgaaaggtttggaatttgttttgattcaccaaagatgggtctttgtctgtttgttcttgttgccattgtctttgattttcgacatctactactacgtcagagcctgggttgttttcagattgtcctccgctccaagattgcacgaacaaagagttagagatatccaaaaacaagttagagaatggaaggaacaaggttctaagaccttcatgtgtactggtagaccaggttggttgaccgtctccttgagagttggtaagtacaagaagactcacaagaacatcatgatcaacttgatggacattttggaagttgacactaagaagcaaatcgttagagttgaaccattggttactatgggtcaagttaccgctttgttgacttccattggttggaccttgccagtcttgccagaattggacgatttgaccgttggtggtttgatcatgggtactggtatcgaatcttcttctcacaagtacggtttgttccaacacatctgtaccgcttacgaattggtcttggccgatggttctttcgttagatgtactccaactgaaaactctgatttgttttacgctgttccatggtcttgtggtaccttgggtttcttggtcgctgccgaaatcagaattattccagccaaaaagtacgttaagttgagatttgaaccagttagaggtttggaagctatctgtgataagttcacccatgaatctcaaagattggaaaaccacttcgtcgaaggtttgttgtactccttggatgaagctgttattatgactggtgttatgaccgacgaagccgaaccatctaaattgaactctattggtaactactacaagccatggttcttcaagcatgtcgaaaactacttgaaaactaaccaagaaggtttggaatacattccattgagacactactaccacagacatactagatccatcttctgggaattgcaagatatcatcccattcggtaacaacccaatctttagatacttgtttggttggatggtcccaccaaagatttctttgttgaagttgacccaaggtgaaaccttgagaaagttgtacgaacaacaccacgtcgtccaagacatgttggttccaatgaagtgtttgccaagagctttgaacaccttccacaacgacattcatgtctacccaatctggttgtgtccattcatcttgccatctcaaccaggtttggttcatccaaaaggtgatgaaactgaattgtacgttgatatcggtgcttacggtgaaccaagagttaaacactttgaagccagatcttgtatgagacaattggaaaagtttgttagatctgttcacggttttcaaatgttgtacgccgattgttacatgaacagagaagaattttgggaaatgttcgacggttctttgtaccacgaattgagagaaaagttgggttgtcaagacgccttcccagaagtttacgataagatctgtaaggctgctagacactag

SEQ ID NO: 40 - DNA, 1551 bp, Otolemur garnetti
atggaaccagctgtttctttggctgtttgtgctttgttgtttttgttgtgggttagattgaaaggtttggaatttgttttgattcatcaaagatgggtttttgtttgtttgtttttgttgccattgtctttgatttttgatatttattattatgttagagcttgggttgtttttagattgtcttctgctccaagattgcatgaacaaagagttagagatattcaaaaacaagttagagaatggaaagaacaaggttctaaaacttttatgtgtactggtagaccaggttggttgactgtttctttgagagttggtaaatataaaaaaacacataaaaatattatgattaatttgatggatattttggaagttgatactaaaaaacaaattgttagagttgaaccattggttactatgggtcaagttactgctttgttgacttctattggttggactttgccagttttgccagaattggatgatttgacagttggtggtttgattatgggtacaggtattgaatcttcttctcataaatatggtttgtttcaacatatttgtactgcttatgaattggttttggctgatggttcttttgttagatgtacaccaactgaaaattctgatttgttttatgctgttccatggtcttgtggtactttgggttttttggttgctgctgaaattagaattattccagctaaaaaatatgttaaattgagatttgaaccagttagaggtttggaagctatttgtgataaatttactcatgaatctcaaagattggaaaatcattttgttgaaggtttgttgtattctttggatgaagctgttattatgactggtgttatgacagatgaagctgaaccatctaaattgaattctattggtaattattataaaccatggttttttaaacatgttgaaaattatttgaaaactaatcaagaaggtttggaatatattccattgagacattattatcatagacatactagatctattttttgggaattgcaagatattattccatttggtaataatccaatttttagatatttgtttggttggatggttccaccaaaaatttctttgttgaaattgactcaaggtgaaactttgagaaaattgtatgaacaacatcatgttgttcaagatatgttggttccaatgaaatgtttgccaagagctttgaatacttttcataatgatattcatgtttatccaatttggttgtgtccatttattttgccatctcaaccaggtttggttcatccaaaaggtgatgaaacagaattgtatgttgatattggtgcttatggtgaaccaagagttaaacattttgaagctagatcttgtatgagacaattggaaaaatttgttagatctgttcatggttttcaaatgttgtatgctgattgttatatgaatagagaagaattttgggaaatgtttgatggttctttgtatcatgaattgagagaaaaattgggttgtcaagatgcttttccagaagtttatgataaaatttgtaaagctgctagacattaa

SEQ ID NO: 41 - protein, 568 aa, Solanum lycopersicum
MTDVQAPPPRPKRKKNIMDLLVQFRWIVVIFVVLPLSFLYYFSIYLGDVRSECKSYKQRQKEHDENVKKVVKRLKERNASKDGLVCTARKPWVAVGMRNVDYKRARHFEVDLSPFRNVLNIDTERMIAKVEPLVNMGQISRVTVPLNVSLAVVAELDDLTVGGLINGYGIEGSSHIYGLFSDTVVSYEVVLADGQVVRATKDNEYSDLFYAIPWSQGTLGLLVSAEIKLIPIKEYMKLTYKPVVGNLKEIAQAYMDSFSPRDGDQDNHEKVPDFVETMVYTPTEAVCMTGRYASKEEAKKKGNVINNVGWWFKTWFYQHAQTALKKGEFVEYIPTREYYHRHTRCLYWEGKLILPFGDQWWFRFLFGWAMPPKVSLLKATQGEYIRNYYHENHVIQDMLVPLYKVGDALEWVHREMEVYPLWLCPHRLYRLPLKTMVYPEPGFELQKRQGDTKYAQMYTDVGVYYAPGPILRGEVFDGIEAVRKLESWLIENHGFQPQYAVSELTEKNFWRMFDGSLYENCRKKYRAIGTFMSVYYKSKKGKKTEKEVQEAEQETAEVETPEVDEPED

SEQ ID NO: 42 - DNA, 1707 bp, Solanum lycopersicum
atgacagatgttcaggctcccccccctcgtcctaagaggaagaaaaacattatggaccttcttgtccagttcagatggattgttgttatcttcgtcgtccttcctctctcgttcttgtattatttctccatatatcttggggatgttaggtctgagtgcaaatcatacaagcagcgccagaaggagcatgatgaaaatgttaaaaaggttgtgaagcgtcttaaggagaggaatgcatctaaggatggtcttgtctgcacagctaggaagccctgggttgctgttggaatgagaaatgtggactacaagcgtgctcgtcattttgaagttgatctttctccatttagaaatgttcttaacattgacacggagcgaatgattgctaaagtcgagcctctagtcaatatgggacaaatctctagagttactgtccctctgaatgtttcccttgcagttgttgctgagcttgatgatctaactgttggtggtctgatcaacggctatgggattgaaggaagttctcacatttatggactgttctcagacactgttgtgtcttatgaagttgttctagcagatgggcaggtagttagagctacaaaggacaatgaatattctgatcttttctatgctattccatggtctcaagggactctagggcttctggtttcagctgagatcaagctcattccgatcaaggaatacatgaaacttacctacaaacctgtagttggtaatttgaaagagattgctcaggcttatatggattctttttcacctagagacggggatcaggataaccatgagaaagttccagactttgttgaaaccatggtgtatactcccacagaagctgtttgcatgactggtagatatgcttcaaaagaagaggccaagaagaagggcaatgtgatcaacaatgttggttggtggttcaaaacctggttttaccagcacgctcaaactgcactcaagaagggagaattcgtagagtacatcccaactagggaatactaccacaggcacacaagatgcttgtattgggaagggaaacttatccttccatttggtgatcaatggtggtttaggtttctctttggatgggccatgcctcccaaggtttctctacttaaagccactcaaggtgaatacattaggaactattaccatgaaaaccatgtcattcaggatatgcttgttcctctctacaaggttggtgatgctcttgagtgggtccaccgtgagatggaggtgtatcccctctggctctgcccccacagactctacaggctgcctcttaaaacaatggtgtatcctgaaccaggttttgagctgcagaagaggcagggtgacacaaaatatgctcaaatgtacactgatgttggtgtctactatgctcctggacctattttgaggggtgaggtctttgatggtatagaggcagtccgtaagttggagagttggttgattgagaaccatggattccagccacagtatgctgtctctgagctgacggagaagaacttctggagaatgtttgatggaagcctatatgagaactgcaggaaaaagtatagagccatcggaaccttcatgagtgtgtactataagtctaagaaaggaaagaagacagagaaggaggtgcaggaagctgagcaagagactgctgaagttgagaccccagaagttgatgagcctgaagattga

SEQ ID NO: 43 - protein, 562 aa, Zea mays
MADVHEPLVRRKRKKVLVDYLVKFRWILVIFVVLPISTLIYFNIFLGDMWSAMKSEKKRQKQHDENVQKVVKRLKQRNPKKDGLVCTARKPWIAVGMRNVDYKRARHFEVDLSSFRNILEIDKERMVAKVEPLVNMGQITRATCPMNLALAVVAELDDLTVGGLINGYGIEGSSHLYGLFSDTVVAMEVVLADGRVVRATKDNEYSDLFYGIPWSQGTLGFLVSAEIKLIPIKEYMKLTYTPVKGGLKEIAQAYADSFAPRDGDPAKVPDFVEGMVYTESEGVMMTGVYASKEEAKKKGNKINCVGWWFKPWFYQHAQTALNRGEFVEYIPTREYYHRHTRCLYWEGKLILPFGDQFWFRFLLGWLMPPKVSLLKATQGEAIRNYYHDNHVIQDMLVPLYKVGDALEFVHREMEVYPLWLCPHRLYKLPVKTMVYPEPGFEHQHRQGDASYAQMFTDVGVYYAPGAVLRGEEFNGAEAVHRLEQWLIENHSYQPQYAVSELNEKDSWRMFDASHYEHCRQKYGAVGTFMSVYYKSKKGRKTEKEVQEAEAAILEPAYADEEA

SEQ ID NO: 44 - DNA, 1689 bp, Zea mays
atggcggacgtgcacgaacctttggtgcgccgtaagaggaagaaggttttggtggactacttggtgaagttccgatggatcctcgtgatcttcgtggtccttcctatttcaactctgatctacttcaacatcttcctgggcgacatgtggtccgccatgaagtcggagaagaagcgccagaagcagcacgacgagaacgtgcagaaggtcgtgaagcggctcaagcagaggaacccgaagaaggacggtcttgtttgcacggccaggaagccctggatcgctgttggcatgcgcaacgtggactacaagcgtgcgaggcatttcgaggtcgacctttcttccttcaggaacatccttgagatcgacaaagagaggatggttgccaaggtcgagccccttgtcaacatgggtcagataaccagagctacctgcccaatgaaccttgcccttgcggtcgtcgccgagctcgacgacctcactgttggtgggctgatcaacggttacggcatcgaggggagctctcacctctatggccttttctccgacacggttgtcgcgatggaggttgttctcgcagatggccgggtcgtcagagccaccaaggacaacgagtactctgaccttttctatggaattccctggtcccagggaacactggggttccttgtctctgcagagatcaagctgatccccatcaaggagtacatgaagctcacctacactccagtcaaggggggtctaaaggagatcgcgcaggcctacgcggattctttcgctccgagggacggtgacccggcaaaggtccctgactttgttgaagggatggtgtacacagagagcgagggtgtcatgatgacgggcgtgtacgcttcgaaagaagaggcgaagaagaagggcaacaagatcaactgcgtggggtggtggtttaagccctggttctaccagcacgctcagacggcgctgaataggggcgagtttgtggagtacatcccgacgagggagtactaccaccggcacacccggtgcctgtactgggaggggaagctgatcctgcccttcggcgaccagttctggttcaggttcctgctgggctggctgatgccaccgaaggtgtccctgctgaaggcgacccagggcgaggctatcaggaactactaccacgacaaccatgtgatccaggacatgctggtgccgctgtacaaggttggggatgcgctggagttcgtgcaccgcgagatggaggtgtatcctctgtggctgtgccctcaccggctgtacaagctgccggtgaagacgatggtgtacccggagcctgggttcgagcaccagcacaggcagggcgacgcgagctacgcacagatgttcacggacgtgggcgtgtactacgcccccggggcggtgctgaggggggaggagttcaacggcgcggaggctgtgcacaggctggagcagtggctgatcgagaaccacagctaccagccgcagtacgcggtgtcggagctgaacgagaaggactcctggcgcatgttcgacgcgtcgcactacgagcactgccgccaaaagtacggggcggtgggcacgttcatgagcgtgtactacaagtccaagaaggggcgcaagacggagaaggaggtgcaggaggcggaggcggccatactggagccggcctacgcggacgaggaggcctaa

SEQ ID NO: 45 - protein, 516 aa, Danio rerio
MDPLLYLGGLAVLFLIWIKVKGLEYVIIHQRWIFVCLFLLPLSVVFDVYYHLRAWIIFKMCSAPKQHDQRVRDIQRQVREWRKDGGKKYMCTGRPGWLTVSLRVGKYKKTHKNIMINMMDILEVDTKRKVVRVEPLANMGQVTALLNSIGWTLPVLPELDDLTVGGLVMGTGIESSSHIYGLFQHICVAFELVLADGSLVRCTEKENSDLFYAVPWSCGTLGFLVAAEIRIIPAQKWVKLHYEPVRGLDAICKKFAEESANKENQFVEGLQYSRDEAVIMTGVMTDHAEPDKTNCIGYYYKPWFFRHVESFLKQNRVAVEYIPLRHYYHRHTRSIFWELQDIIPFGNNPLFRYVFGWMVPPKISLLKLTQGETIRKLYEQHHVVQDMLVPMKDIKAAIQRFHEDIHVYPLWLCPFLLPNQPGMVHPKGDEDELYVDIGAYGEPKVKHFEATSSTRQLEKFVRDVHGFQMLYADVYMERKEFWEMFDGTLYHKLREELGCKDAFPEVFDKICKSARH

SEQ ID NO: 46 - DNA, 1551 bp, Danio rerio
atggacccattgttatacttgggtggtttagctgttttgtttttaatttggatcaaggttaaaggtttagaatatgttattattcatcaaagatggatttttgtttgtttatttttgttgccattgtcagttgttttcgatgtttactaccatttgagagcttggatcatttttaagatgtgttctgcaccaaagcaacatgatcaaagagttagagatattcaaagacaagttagagaatggagaaaagatggtggtaaaaagtacatgtgtactggtagaccaggttggttgacagtttcattaagagttggtaaatacaagaaaactcataagaacatcatgattaatatgatggatattttagaagttgatacaaagagaaaggttgttagagttgaaccattggctaatatgggtcaagttactgcattgttaaattctatcggttggacattgccagttttaccagaattggatgatttgactgttggtggtttagttatgggtacaggtatcgaatcttcatctcatatctatggtttgttccaacatatttgtgttgctttcgaattggttttagcagatggttctttagttagatgtactgaaaaggaaaattcagatttgttttacgctgttccttggtcttgtggtacattgggtttcttggttgctgcagaaatcagaatcatcccagctcaaaagtgggttaaattgcattatgaaccagttagaggtttggatgcaatttgtaagaaattcgctgaagaatcagcaaataaggaaaaccaattcgttgaaggtttacaatattcaagagatgaagctgttattatgactggtgttatgacagatcatgcagaaccagataagactaactgtatcggttactactacaagccttggtttttcagacatgttgaatcatttttaaagcaaaacagagttgcagttgaatacatcccattgagacattactaccatagacatacaagatcaattttctgggaattacaagatattatcccattcggtaacaacccattgtttagatacgtttttggttggatggttccaccaaaaatttcattgttgaaattgactcaaggtgaaacaatcagaaaattgtacgaacaacatcatgttgttcaagatatgttagttccaatgaaggatattaaggctgcaatccaaagattccatgaagatattcatgtttacccattgtggttgtgtccatttttgttaccaaatcaacctggtatggttcatccaaaaggtgacgaagatgaattgtacgttgatattggtgcttatggtgaaccaaaggttaagcatttcgaagcaacttcatctacaagacaattagaaaagtttgttagagatgttcatggtttccaaatgttgtacgctgatgtttacatggaaagaaaggaattttgggaaatgttcgatggtactttgtaccataaattgagagaagaattgggttgtaaagatgcttttccagaagtttttgataaaatttgtaaatctgcaagacattaa

SEQ ID NO: 47 - protein, 516 aa, Homo sapiens; identical to SEQ ID NO: 25

SEQ ID NO: 48 - DNA, 1551 bp, Homo sapiens
atggaaccagctgtttcattggctgtttgtgcattgttatttttgttgtgggttagattgaagggtttagaatttgttttgattcatcaaagatgggttttcgtttgtttgtttttgttaccattgtctttaatcttcgatatatattactacgttagagcttgggttgtttttaaattatcttcagcaccaagattgcatgaacaaagagttagagatattcaaaagcaagttagagaatggaaggaacaaggttcaaagacttttatgtgtacaggtagaccaggttggttgactgtttctttaagagttggtaaatacaagaaaactcataagaacatcatgattaatttgatggatattttagaagttgatactaagaaacaaatcgttagagttgaaccattggttacaatgggtcaagttactgctttgttaacatctattggttggactttgccagttttaccagaattggatgatttgactgttggtggtttaattatgggtacaggtatcgaatcttcatctcataagtacggtttgttccaacatatttgtactgcttatgaattggttttagcagatggttcatttgttagatgtacaccatcagaaaattctgatttgttttatgctgttccttggtcttgtggtactttgggtttcttggttgctgcagaaattagaatcatcccagctaagaaatacgttaaattgagatttgaaccagttagaggtttggaagctatttgtgcaaagtttactcatgaatcacaaagacaagaaaaccatttcgttgaaggtttgttgtactctttagatgaagctgttattatgactggtgttatgacagatgaagcagaaccatcaaaattaaattctatcggtaactactacaagccttggtttttcaagcatgttgaaaactacttaaagactaatagagaaggtttagaatacatcccattgagacattactaccatagacatacaagatcaattttctgggaattgcaagatattatcccattcggtaacaacccaatttttagatacttattcggttggatggttccaccaaaaatttctttgttgaaattgactcaaggtgaaacattgagaaaattgtacgaacaacatcatgttgttcaagatatgttagttccaatgaagtgtttgcaacaagcattgcatacattccaaaacgatattcatgtttacccaatttggttgtgtccttttattttgccatcacaaccaggtttagttcatccaaagggtaatgaagctgaattgtacattgatattggtgcttatggtgaaccaagagttaagcatttcgaagctagatcatgtatgagacaattagaaaagtttgttagatcagttcatggtttccaaatgttgtacgcagattgttacatgaacagagaagaattttgggaaatgttcgatggttctttgtaccataaattgagagaaaaattgggttgtcaagatgcatttccagaagtttatgataaaatttgtaaagctgcaagacattaa

SEQ ID NO: 49 - protein, 504 aa, Homo sapiens
MMTTSLIWGIAIAACCCLWLILGIRRRQTGEPPLENGLIPYLGCALQFGANPLEFLRANQRKHGHVFTCKLMGKYVHFITNPLSYHKVLCHGKYFDWKKFHFATSAKAFGHRSIDPMDGNTTENINDTFIKTLQGHALNSLTESMMENLQRIMRPPVSSNSKTAAWVTEGMYSFCYRVMFEAGYLTIFGRDLTRRDTQKAHILNNLDNFKQFDKVFPALVAGLPIHMFRTAHNAREKLAESLRHENLQKRESISELISLRMFLNDTLSTFDDLEKAKTHLVVLWASQANTIPATFWSLFQMIRNPEAMKAATEEVKRTLENAGQKVSLEGNPICLSQAELNDLPVLDSIIKESLRLSSASLNIRTAKEDFTLHLEDGSYNIRKDDIIALYPQLMHLDPEIYPDPLTFKYDRYLDENGKTKTTFYCNGLKLKYYYMPFGSGATICPGRLFAIHEIKQFLILMLSYFELELIEGQAKCPPLDQSRAGLGILPPLNDIEFKYKFKHL

SEQ ID NO: 50 - DNA, 1515 bp, Homo sapiens
atgatgactacatctttgatttggggtattgctattgctgcatgttgttgtttgtggttgatcttgggtattagaagaagacaaactggtgaaccaccattggaaaacggtttgatcccatatttgggttgtgctttacaattcggtgcaaacccattggaattcttgagagctaaccaaagaaagcatggtcatgtttttacttgtaagttgatgggtaaatacgttcatttcatcacaaacccattgtcataccataaagttttatgtcatggtaaatacttcgattggaagaaattccatttcgctacttctgctaaggcatttggtcatagatcaattgatccaatggatggtaatactacagaaaacatcaacgatacttttattaagacattgcaaggtcatgcattgaactctttgacagaatcaatgatggaaaatttgcaaagaatcatgagaccaccagtttcttcaaattctaaaactgctgcatgggttacagaaggcatgtactcattctgttacagagttatgttcgaagctggttatttgactatcttcggtagagatttgactagaagagatacacaaaaggcacatatcttgaacaatttggataacttcaaacaatttgataaagtttttccagctttggttgcaggtttaccaattcatatgtttagaacagctcataatgcaagagaaaagttggctgaatctttgagacatgaaaatttgcaaaagagagaatctatctcagaattgatctctttgagaatgtttttgaatgatactttatcaacattcgatgatttggaaaaggcaaagactcatttggttgttttgtgggcttctcaagcaaatactattccagctacattctggtcattgttccaaatgatcagaaacccagaagcaatgaaagctgcaactgaagaagttaagagaacattggaaaacgctggtcaaaaagtttctttggaaggtaacccaatctgtttgtcacaagcagaattgaacgatttgccagttttggattctattattaaggaatcattgagattgtcttcagcttctttgaacatcagaactgcaaaggaagatttcacattgcatttggaagatggttcatacaacatcagaaaggatgatatcattgctttatatccacaattaatgcacttagatccagaaatctatccagatccattgacttttaaatacgatagatatttggatgaaaatggtaaaacaaaaactacattctactgtaacggtttgaagttgaagtattactatatgccatttggttctggtgctacaatttgtccaggtagattgtttgcaatccatgaaattaaacaattcttgatcttgatgttatcttattttgaattggaattgatcgaaggtcaggctaagtgtccaccattggatcaatcaagagcaggtttgggtattttgccaccattgaacgatattgaattcaaatacaagtttaaacatttgtaa

SEQ ID NO: 51 - protein, 503 aa, Rattus norvegicus
MMTISLIWGIAVLVSCCIWFIVGIRRRKAGEPPLENGLIPYLGCALKFGSNPLEFLRANQRKHGHVFTCKLMGKYVHFITNSLSYHKVLCHGKYFDWKKFHYTTSAKAFGHRSIDPNDGNTTENINNTFTKTLQGDALCSLSEAMMQNLQSVMRPPGLPKSKSNAWVTEGMYAFCYRVMFEAGYLTLFGRDISKTDTQKALILNNLDNFKQFDQVFPALVAGLPIHLFKTAHKAREKLAEGLKHKNLCVRDQVSELIRLRMFLNDTLSTFDDMEKAKTHLAILWASQANTIPATFWSLFQMIRSPEAMKAASEEVSGALQSAGQELSSGGSAIYLDQVQLNDLPVLDSIIKEALRLSSASLNIRTAKEDFTLHLEDGSYNIRKDDMIALYPQLMHLDPEIYPDPLTFKYDRYLDESGKAKTTFYSNGNKLKCFYMPFGSGATICPGRLFAVQEIKQFLILMLSCFELEFVESQVKCPPLDQSRAGLGILPPLHDIEFKYKLKH

SEQ ID NO: 52 - DNA, 1512 bp, Rattus norvegicus
atgatgacaatttctttgatttggggtatcgctgttttagtttcatgttgtatctggttcatcgttggtattagaagaagaaaggcaggtgaaccaccattagaaaatggtttgattccatacttaggttgtgctttgaagttcggttctaacccattggaattcttgagagcaaaccaaagaaagcatggtcatgtttttacatgcaagttgatgggtaaatacgttcatttcatcactaactctttgtcataccataaagttttatgtcatggtaaatacttcgattggaagaaattccattacactacatctgctaaggcatttggtcatagatcaatcgatccaaacgatggtaacactacagaaaacatcaacaacacttttacaaagactttacaaggtgacgctttatgttctttgtcagaagcaatgatgcaaaatttgcaatctgttatgagaccaccaggtttaccaaaatctaaatcaaatgcttgggttacagaaggcatgtacgcattctgttacagagttatgttcgaagctggttatttgactttgttcggtagagatatctcaaaaacagatactcaaaaagcattgatcttgaacaatttggataacttcaaacaatttgatcaagtttttccagctttagttgcaggtttgccaatccatttgtttaaaacagctcataaggcaagagaaaagttggctgaaggtttgaagcataagaatttgtgtgttagagatcaagtttctgaattgatcagattgagaatgttcttgaatgatacattatcaactttcgatgatatggaaaaggctaagactcatttggcaatcttgtgggcttctcaagcaaatacaattccagctactttctggtctttgttccaaatgatcagatcaccagaagcaatgaaagctgcatctgaagaagtttcaggtgctttgcaatctgcaggtcaagaattatcttcaggtggttcagctatatatttggatcaagttcaattgaacgatttgccagttttggattctattattaaggaagctttgagattgtcttcagcatcattgaacatcagaacagctaaggaagatttcactttgcatttggaagatggttcttacaacatcagaaaggatgatatgattgcattatacccacaattgatgcacttagatccagaaatctatccagatccattgacttttaaatacgatagatacttagatgaatctggtaaagctaagactacattctactcaaacggtaataagttgaagtgtttctacatgccatttggttctggtgctactatttgtccaggtagattatttgcagttcaagaaattaaacaattcttgatcttgatgttgtcttgtttcgaattggaattcgttgaatcacaggttaagtgtccaccattagatcaatcaagagctggtttgggtattttaccaccattgcatgatatcgaattcaaatataaattgaaacattaa

SEQ ID NO: 53 - protein, 503 aa, Mus musculus
MMSISLIWGIAVVVSCCIWFIIGIRRRKVGEPPLDNGLIPYLGCALKFGSNPLEFLRAKQRKHGHVFTCKLMGKYVHFITNSLSYHKVLCHGKYFDWKKFHYTTSAKAFGHRSIDPSDGNTTENINKTFNKTLQGDALCSLSEAMMQNLQSVMRPPGLPKSKSAVWVTEGMYAFCYRVMFEAGYLTLFGKDISKTDSQRAFIQNNLDSFKQFDQVFPALVAGVPIHLFKTAHKARERLAESLKHKNLYMRDQVSELIRLRMFLNDTLSTFDDMEKAKTHLVILWASQANTIPATFWSLFQMIRSPEAMKAASEEVNGALQSAGQELSSGGNAIYLDQEQLNNLPVLDSIIKEALRLSSASLNIRTAKEDFTLHLEDGSYNIRKDDIIALYPQLMHLDPEIYPDPLTFKYDRYLDESGKAKTTFYRNGNKLKYFYMPFGSGATICPGRLFAVQEIKQFLILMLSYFELELVESHTKCPPLDQSRAGLGILPPLNDIEFKYKLKH

SEQ ID NO: 54 - DNA, 1512 bp, Mus musculus
atgatgtctatctcattgatctggggtatcgctgttgttgtttcttgttgtatttggttcatcatcggtattagaagaagaaaggttggtgaaccaccattggataacggtttgatcccatatttgggttgtgcattgaagttcggttcaaacccattggaattcttgagagctaagcaaagaaagcatggtcatgtttttacttgtaagttaatgggtaaatacgttcatttcatcacaaactctttatcataccataaggttttgtgtcatggtaaatacttcgattggaagaaattccattacactacatctgctaaggcatttggtcatagatctattgatccatcagatggtaatactacagaaaacatcaataagacttttaataagacattgcaaggtgacgctttatgttctttgtcagaagcaatgatgcaaaatttgcaatcagttatgagaccaccaggtttgccaaaatctaaatcagctgtttgggttactgaaggcatgtacgcattctgttacagagttatgttcgaagctggttacttgactttgttcggtaaagatatctctaagacagattcacaaagagcttttattcaaaacaatttggattcttttaaacaatttgatcaagtttttccagctttagttgcaggtgttccaatccatttgtttaaaactgctcataaagcaagagaaagattagcagaatctttgaagcataagaatttgtacatgagagatcaagtttcagaattaattagattgagaatgtttttaaatgatactttgtctacattcgatgatatggaaaaggctaagacacatttggttattttgtgggcttcacaagcaaatactattccagcaacattctggtctttgttccaaatgatcagatcaccagaagctatgaaagctgcatctgaagaagttaatggtgctttacaatcagcaggtcaagaattgtcttcaggtggtaatgctatatatttggatcaagaacaattgaacaatttgccagttttggattctattattaaggaagctttgagattgtcttcagcatcattgaacatcagaactgcaaaggaagatttcacattgcatttggaagatggttcttacaacatcagaaaggatgatatcattgctttgtacccacaattgatgcacttagatccagaaatctatccagatccattgacttttaaatacgatagatacttggatgaatctggtaaagcaaaaactacattctacagaaacggtaataagttgaagtatttttacatgccatttggttcaggtgcaactatttgtccaggtagattgtttgctgttcaagaaattaaacaattcttgatcttgatgttgtcttacttcgaattggaattggttgaatcacatacaaagtgtccaccattagatcaatctagagctggtttgggtattttaccaccattgaatgatattgaattcaaatataaattgaaacattaa

SEQ ID NO: 55 - protein, 501 aa, Oryctolagus cuniculus
MITIFWIWGICLSVCCCLWLILGLRRRRMGEPPLEKGWIPYLGCALQFGANPLDFLRANQRKYGHVFTCKLMGKYVHFITNSLSYHKVLCHGKYFDWKKFHFTTSAKAFGHRSIDPRDGNTTENINNTFNKTLQGDALISLTDAMMENLQLTLRRPEPKSRAWVTEGMYSFCYRVMFEAGYLTLFGRELTRQDAQRAFILNSLEDFKQFDKVFPALVAGLPIHIFMTAHNAREKLAEGLKHDNLRTRDHISELIRLRMFLNDTLSTFDAMEKAKTHLAILWASQANTIPATFWSLFHMMRSSEALKAATEEVNKALEDADQQINFEGKPIHLNQTQLNDMPVLDSIIKESLRLSSASLNIRTAKEDFTLHLEDGSYNIRKDDIIALYPQLMHLDPEIYPDPMTFKYDRYLDENRKTKTTFYSKGLKLKYYYMPFGSGATICPGRLFAIQEIKQFLILMLSYFELEFVDSHVKCPPLDQSRAGLGILPPLNDIEFKYKFKHL

SEQ ID NO: 56 - DNA, 1506 bp, Oryctolagus cuniculus
atgattactattttctggatttggggtatctgtttgtctgtttgttgttgtttgtggttgatcttgggtttgagaagaagaagaatgggtgaaccaccattggaaaaaggttggattccatatttgggttgtgctttgcaatttggtgcaaatccattggatttcttgagagctaaccaaagaaagtacggtcatgtttttacttgtaagttaatgggtaaatacgttcatttcatcacaaactctttatcataccataaggttttgtgtcatggtaaatacttcgattggaagaaattccatttcactacatctgctaaggcatttggtcatagatcaattgatccaagagatggtaatactacagaaaacatcaacaacacttttaataagacattgcaaggtgacgctttgatctctttgactgatgcaatgatggaaaatttgcaattgacattgagaagaccagaaccaaaatctagagcttgggttactgaaggcatgtactcattctgttacagagttatgttcgaagcaggttacttaactttgttcggtagagaattgacaagacaagatgctcaaagagcttttattttgaactcattggaagatttcaaacaatttgataaagtttttccagctttagttgcaggtttgccaatccatatttttatgactgctcataacgcaagagaaaagttggctgaaggtttgaagcatgataatttgagaacaagagatcatatctctgaattgatcagattgagaatgttcttgaatgatactttgtcaacatttgatgctatggaaaaggcaaagacacatttggctatcttgtgggcttctcaagcaaatactattccagcaacattctggtcattgttccatatgatgagatcttcagaagcattgaaagctgcaactgaagaagttaataaggctttggaagatgcagatcaacaaattaatttcgaaggtaaaccaatccatttgaaccaaacacaattgaacgatatgccagttttggattctattattaaggaatcattgagattgtcttcagcttctttgaacatcagaactgcaaaggaagatttcacattgcatttggaagatggttcatacaacatcagaaaggatgatatcattgctttatatccacaattgatgcacttagatccagaaatctatccagatccaatgacttttaaatacgatagatatttggatgaaaacagaaagacaaagactacattctactctaaaggtttaaaattgaaatattactatatgccatttggttcaggtgctacaatttgtccaggtagattatttgcaatccaagaaattaaacaattcttgatcttgatgttatcttattttgaattagaatttgttgattcacatgttaaatgtccaccattggatcaatctagagctggtttgggtattttaccaccattgaacgatatcgaattcaaatacaagtttaaacatttgtaa

SEQ ID NO: 57 - protein, 500 aa, Bos taurus
MMSLSLIWGIVIAVCCCLYLLGMRRRQMGEPPLENGLIPYLGCALQFGANPLEFLRANQRKHGHVFTCRLMGNYVHFITNPLSYHKVLCHGKYFDWKKFHFTASAKAFGHRSIDPSDGNTTDTISKTIIKTLQGDALSSLTEAMMGNLQLVLRPQGPPQPPTPTWVTEGMYSFCYRVMFEAGYLTLFGRDLAGQDAQKALILNSLDNFKQFDKIFPALVAGFPIHVFKTGHYAREKLTEGLRLQKFRERDHISELVRFLNDTFATLDDTERAKSLLAVLWASQANTIPATFWSLFQMIRNPEAMKAATEEVNKTLENAGQKVSFEDSPIHLNQTQLDNMPVLDSIIKESLRLSSASLNIRTAKEDFTLHLQDGSYNIRKDDIIALYPQLMHLDPEIYPDPLTFKYDRYLDENGKTKTTFYSNGLKLKYYYMPFGSGVTICPGRLFAVQEIKQFLILMLSYFELELVESCVKCPPLDQSRAGLGILPPLYDTEFRYKFKHS

SEQ ID NO: 58 - DNA, 1503 bp, Bos taurus
atgatgtctttgtcattgatctggggtatcgttatcgcagtttgttgttgtttgtatttgttgggtatgagaagaagacaaatgggtgaaccaccattagaaaatggtttgattccatacttaggttgtgcattgcaattcggtgctaacccattggaattcttgagagctaaccaaagaaagcatggtcatgtttttacatgtagattgatgggtaactacgttcatttcatcactaacccattatcttaccataaggttttgtgtcatggtaaatacttcgattggaagaaattccatttcacagcttcagcaaaggcttttggtcatagatctattgatccatcagatggtaatactacagatactatctctaagacaattattaagactttacaaggtgacgcattgtcttcattaactgaagctatgatgggtaatttgcaattagttttgagaccacaaggtccaccacaaccaccaactccaacatgggttacagaaggcatgtactcattctgttacagagttatgttcgaagcaggttatttgactttgtttggtagagatttggctggtcaagatgcacaaaaagctttgatcttgaactctttggataacttcaaacaatttgataaaatttttccagcattggttgctggtttcccaatccatgtttttaaaacaggtcattacgcaagagaaaagttgactgaaggtttgagattgcaaaagtttagagaaagagatcatatctctgaattagttagatttttgaacgatactttcgctacattggatgatacagaaagagcaaagtctttgttagctgttttgtgggcatcacaagctaatacaattccagcaactttctggtctttgttccaaatgatcagaaacccagaagctatgaaagctgcaacagaagaagttaataagactttggaaaatgctggtcaaaaagtttctttcgaagattcaccaatccatttgaaccaaactcaattggataacatgccagttttggattctattattaaggaatcattgagattgtcttcagcatctttgaacatcagaacagctaaggaagatttcactttgcatttgcaagatggttcatacaacatcagaaaggatgatatcatcgctttgtacccacaattgatgcacttagatccagaaatctatccagatccattgacttttaaatacgatagatatttggatgaaaatggtaaaactaaaactacattctactctaacggtttgaagttgaagtattactatatgccatttggttcaggtgttacaatttgtccaggtagattatttgcagttcaagaaattaaacaattcttgatcttgatgttgtcttactttgaattggaattagttgaatcatgtgttaagtgtccaccattggatcaatcaagagctggtttgggtattttaccaccattgtacgatactgaattcagatataagtttaaacattcttaa

SEQ ID NO: 59 - protein, 507 aa, Sarcophilus harrisii
MLTISISLIWGFVVAVCCCLWLIIGIRRRRLGEPPLDNGLIPYVGCALQFGANPLEFLRTKKRKYGHIFTCKLMGKYVHFITNPFSYNTVLRHGKYFDWKKINYATSAKAFGHRSIDPSDGNTTENVHETLIKTLQGDALNSLTEAMMENLQYVMKPSVLSKTNPDSWVTEGMCSFCYRVMFEAGYLTLFGKDLTRQEVQRTFILNSLNNFKQFDKIFPALVAGLPIHVFKNAHNAREKLAETLRHENLQKRDNISELITTRMFLNDTLSTFDDMEKAKTHLALLWAAQANTLPATFWCLFHTISRSPEAMKTATEEVRKTLENSGQKISFEGKPISLSQMQLNDMPVLDSIIKEALRLCSASLNIRAAKEDFTLHLEEGSYSIRKDDIIAFYPQLLHFDPEIYPDPLVFKYDRYLDENGKPKTNFYYNGIKLKYYYMPFGSGLSLCPGRLFAVHEIKQFLILMLSYFEMKLVDSQVKYPPLDQSRLGLGILPPTNDIDFKYKLKHL

SEQ ID NO: 60 - DNA, 1524 bp, Sarcophilus harrisii
atgttgacaatctctatctcattgatctggggtttcgttgttgctgtttgttgttgtttgtggttgatcatcggtattagaagaagaagattgggtgaaccaccattagataatggtttgattccatatgttggttgtgctttgcaattcggtgcaaacccattggaattcttgagaactaagaaaagaaagtacggtcatatttttacttgtaagttgatgggtaaatacgttcatttcatcactaacccattttcttacaacacagttttgagacatggtaaatacttcgattggaagaaaattaattacgctacatcagctaaggcatttggtcatagatctattgatccatcagatggtaacactacagaaaacgttcatgaaactttgattaaaacattgcaaggtgacgctttaaattctttgactgaagcaatgatggaaaatttgcaatacgttatgaagccatctgttttgtcaaagactaatccagattcttgggttacagaaggcatgtgttcattctgttacagagttatgttcgaagctggttatttgactttgttcggtaaagatttgacaagacaagaagttcaaagaacttttattttgaactcattgaacaacttcaaacaatttgataaaatttttccagctttagttgcaggtttgccaatccatgtttttaaaaacgctcataacgcaagagaaaagttggcagaaacattgagacatgaaaatttgcaaaagagagataacatctctgaattgattactacaagaatgtttttaaatgatactttgtcaacattcgatgatatggaaaaggctaagactcatttggcattgttgtgggctgcacaagctaatactttaccagcaacattctggtgtttgttccatacaatctctagatcaccagaagctatgaaaactgcaacagaagaagttagaaagactttggaaaattctggtcaaaagatttcattcgaaggtaaaccaatctctttgtcacaaatgcaattgaacgatatgccagttttggattctattattaaggaagctttgagattgtgttctgcatcattgaacatcagagctgcaaaggaagatttcacattgcatttggaagaaggttcttactcaatcagaaaggatgatatcatcgctttctatccacaattgttgcatttcgatccagaaatctatccagatccattagtttttaaatacgatagatatttggatgaaaatggtaaaccaaagactaacttctactacaacggtattaaattgaaatattactatatgccatttggttctggtttgtcattatgtccaggtagattatttgcagttcatgaaattaaacaattcttgatcttgatgttgtcttattttgaaatgaaattagttgattcacaggttaagtacccaccattggatcaatctagattaggtttgggtattttaccaccaactaatgatattgattttaaatataaattaaaacatttgtaa

SEQ ID NO: 61 - protein, 513 aa, Gallus gallus
MITTSWIWGTVIIVCCSFWFLFGRRRRRRQGEPPLENGFLPYLGCALQFGANPLKFLREKQKKHGHIFTCQVAGKYIHFLTDPFSYHSLIRQGKYLDWKKFHFATSAKAFGHGSIDPAEGNTTENFHHTFIRTLQGNALDALIKAMMENLQYVMLQSRASKFQPNTWVTEGLYTFCCQVMFESGFLTLFGKEFNSNHDKNLSKRETERARILNALENFKEFDKIFPALVAGLPIHLFKSAHSAREKLGEALLHKNLLKRDNLSELVMLRMFLNDTLSTFDDMEKAKTHVAVLWASQANTIPATFWSLFTFLRNPEAMRAATKEVQSVLESAGEKISLDGNYISLNRKQLDNMPVLDSIIKEAMRLSSASMTFRVAKEDFTLHLENSFYNIRKDDIVALYPQLLHFDPEIYADPLTFKYDRYLNENKEEKTDFYRNGRKLKYYYMPFGAGIAKCPGRLFAVHEIKQFLVLIFSYFEIDLVDSNVQCPSLDQSRAGLGILQPSNDIDFRYRLKCL

SEQ ID NO: 62 - DNA, 1542 bp, Gallus gallus
atgattactacatcttggatttggggtactgttattatcgtttgttgttcattctggttcttgttcggtagaagaagaagaagaagacaaggtgaaccaccattggaaaatggtttcttgccatatttgggttgtgctttacaattcggtgcaaacccattgaagttcttgagagaaaagcaaaagaaacatggtcatatttttacttgtcaagttgctggtaaatacatccatttcttgacagatccattttcttaccattcattgatcagacagggtaaatatttggattggaagaaattccatttcgctacatctgctaaggcatttggtcatggttcaattgatccagcagaaggtaatactacagaaaacttccatcatacttttattagaacattacagggtaatgctttggatgcattgattaaagctatgatggaaaatttgcaatacgttatgttgcaatctagagcatcaaagttccaaccaaacacttgggttacagaaggtttgtacactttctgttgtcaagttatgttcgaatctggtttcttgacattgttcggtaaagaattcaattctaaccatgataagaatttgtcaaagagagaaactgaaagagctagaattttgaatgcattggaaaacttcaaggaattcgataagatttttccagctttagttgcaggtttgccaattcatttgtttaaatctgctcattcagcaagagaaaagttgggtgaagctttgttgcataagaatttgttgaagagagataatttgtctgaattagttatgttgagaatgtttttgaatgatactttatcaacattcgatgatatggaaaaggctaagacacatgttgcagttttgtgggcttctcaagcaaatactattccagctacattctggtcattgtttacatttttgagaaacccagaagcaatgagagctgcaacaaaagaagttcaatctgttttggaatcagctggtgaaaagatttctttagatggtaactacatctcattgaacagaaagcaattggataacatgccagttttggattctattattaaggaagctatgagattgtcttcagcatcaatgacttttagagttgctaaggaagatttcacattgcatttggaaaactctttctacaacatcagaaaggatgatatcgttgctttgtacccacaattgttgcatttcgatccagaaatctatgcagatccattgacttttaaatacgatagatatttgaacgaaaataaggaagaaaagactgatttctacagaaacggtagaaagttgaagtattactatatgccatttggtgctggtattgcaaaatgtccaggtagattatttgctgttcatgaaattaaacaattcttggttttgattttctcttattttgaaattgatttggttgattcaaatgttcaatgtccatctttagatcaatcaagagcaggtttgggtattttgcaaccatctaacgatattgattttagatacagattaaaatgtttgtaa

SEQ ID NO: 63 - protein, 512 aa, Danio rerio
MILTISFIWAIVVGLCCCLWLITGIRRRHPAEPPLENGWIPFLGCALQFGANPLEFLRSRQKKHGHIFTCKIAGQYVHFLCDPFSYHAVIRQGRHLDWKKFHFDASAKAFGHESMDPSQGYTTENLHQTFLKTLQGDALSSLIETMMENLQGTMLQSGMLKATTSEWQSDGIYAFCYKVMFEAGYLTLFGKELDGDQSIARQQAQKALVLNALDNFKEFDKIFPALIAGLPIHVFKSAYSAREKLAKTMLHENLSRRANVSDLISLRMLLNDTLSTFNELSKARTHVAILWASQANTLPATFWTLFHMIRCPAAMKAASEEVRRTFESSNQKVDPTNSRLVLTREQLDNMPVLDSIIKEAMRLSSASLNVRMAKSDFLLQLDNKESYHIRKDDVIAMYPPMIHFDPEIYDDPLEFKYDRYIDENGQEKTTFYRNGRKLRYYYMPFGSGVTKCPGRFFAVHEIKQFLSLLLSYFEMELLDSDVKEPPLDQSRAGLGVLQPTYDVDFRYRLKSL

SEQ ID NO: 64 - DNA, 1539 bp, Danio rerio
atgatcttgactatctcttttatttgggcaatcgttgttggtttgtgttgttgtttgtggttgatcacaggtattagaagaagacatccagctgaaccaccattggaaaatggttggattccatttttaggttgtgcattgcaattcggtgctaacccattggaattcttgagatcaagacaaaagaaacatggtcatatttttacttgtaagatcgcaggtcaatacgttcatttcttgtgtgatccattttcttatcatgctgttattagacaaggtagacatttggattggaagaaattccatttcgatgcttcagcaaaggcttttggtcatgaatctatggacccatcacaaggttacactacagaaaatttgcatcaaacatttttgaagacattgcaaggtgacgcattatcttcattgatcgaaactatgatggaaaatttgcaaggtacaatgttgcaatctggcatgttaaaagctactacatctgaatggcaatcagatggtatctatgcattctgttacaaagttatgtttgaagctggttatttgactttgttcggtaaagaattggatggtgaccaatcaattgcaagacaacaagcacaaaaagctttagttttgaatgctttggataacttcaaggaattcgataagatcttcccagcattgatcgctggtttgccaatccatgtttttaaatctgcatactcagctagagaaaagttggcaaagacaatgttgcatgaaaatttgtctagaagagctaacgtttctgatttgatctcattgagaatgttgttgaacgatactttgtctacttttaatgaattatcaaaagcaagaactcatgttgctattttatgggcatctcaagctaatacattgccagctactttctggacattgttccatatgatcagatgtccagctgcaatgaaagctgcatcagaagaagttagaagaacattcgaatcttcaaaccaaaaggttgatccaactaactctagattagttttgacaagagaacaattggataacatgccagttttggattcaattattaaggaagcaatgagattgtcttcagcttctttgaacgttagaatggcaaagtcagatttcttgttgcaattggataataaggaatcttaccatatcagaaaggatgatgttattgctatgtatccaccaatgatccatttcgatccagaaatctatgatgatccattggaattcaaatacgatagatacatcgatgaaaacggtcaagaaaagactacattctacagaaacggtagaaagttgagatattactatatgccatttggttctggtgttactaaatgtccaggtagatttttcgctgttcatgaaattaaacaattcttgtctttgttgttgtcatacttcgaaatggaattgttggattctgatgttaaagaaccaccattagatcaatcaagagctggtttaggtgttttgcaaccaacatacgatgttgatttcagatacagattaaaatctttgtaa

SEQ ID NO: 65 - protein, 503 aa, Mus musculus
MMSISLIWGIAVVVSCCIWFIIGIRRRKVGEPPLDNGLIPYLGCALKFGSNPLEFLRAKQRKHGHVFTCKLMGKYVHFITNSLSYHKVLCHGKYFDWKKFHYTTSAKAFGHRSIDPSDGNTTENINKTFNKTLQGDALCSLSEAMMQNLQSVMRPPGLPKSKSAVWVTEGMYAFCYRVMFEAGYLTLFGKDISKTDSQRAFIQNNLDSFKQFDQVFPALVAGVPIHLFKTAHKARERLAESLKHKNLYMRDQVSELIRLRMFLNDTLSTFDDMEKAKTHLVILWASQANTIPATFWSLFQMIRSPEAMKAASEEVNGALQSAGQELSSGGNAIYLDQEQLNNLPVLDSIIKEALRLSSGSLNIRTAKEDFTLHLEDGSYNIRKDDIIALYPQLMHLDPEIYPDPLTFKYDRYLDESGKAKTTFYRNGNKLKYFYMPFGSGATICPGRLFAVQEIKQFLILMLSYFELELVESHTKCPPLDQSRAGLGILPPLNDIEFKYKLKH

SEQ ID NO: 66 - DNA, 1512 bp, Mus musculus
atgatgtctatctcattgatctggggtatcgctgttgttgtttcttgttgtatttggttcatcatcggtattagaagaagaaaggttggtgaaccaccattggataacggtttgatcccatatttgggttgtgcattgaagttcggttcaaacccattggaattcttgagagctaagcaaagaaagcatggtcatgtttttacttgtaagttaatgggtaaatacgttcatttcatcacaaactctttatcataccataaggttttgtgtcatggtaaatacttcgattggaagaaattccattacactacatctgctaaggcatttggtcatagatctattgatccatcagatggtaatactacagaaaacatcaataagacttttaataagacattgcaaggtgacgctttatgttctttgtcagaagcaatgatgcaaaatttgcaatcagttatgagaccaccaggtttgccaaaatctaaatcagctgtttgggttactgaaggcatgtacgcattctgttacagagttatgttcgaagctggttacttgactttgttcggtaaagatatctctaagacagattcacaaagagcttttattcaaaacaatttggattcttttaaacaatttgatcaagtttttccagctttagttgcaggtgttccaatccatttgtttaaaactgctcataaagcaagagaaagattagcagaatctttgaagcataagaatttgtacatgagagatcaagtttcagaattaattagattgagaatgtttttaaatgatactttgtctacattcgatgatatggaaaaggctaagacacatttggttattttgtgggcttcacaagcaaatactattccagcaacattctggtctttgttccaaatgatcagatcaccagaagctatgaaagctgcatctgaagaagttaatggtgctttacaatcagcaggtcaagaattgtcttcaggtggtaatgctatatatttggatcaagaacaattgaacaatttgccagttttggattctattattaaggaagctttgagattgtcttcaggatcattgaacatcagaactgcaaaggaagatttcacattgcatttggaagatggttcttacaacatcagaaaggatgatatcattgctttgtacccacaattgatgcacttagatccagaaatctatccagatccattgacttttaaatacgatagatacttggatgaatctggtaaagcaaaaactacattctacagaaacggtaataagttgaagtatttttacatgccatttggttcaggtgcaactatttgtccaggtagattgtttgctgttcaagaaattaaacaattcttgatcttgatgttgtcttacttcgaattggaattggttgaatcacatacaaagtgtccaccattagatcaatctagagctggtttgggtattttaccaccattgaatgatattgaattcaaatataaattgaaacattaa

SEQ ID NO: 67 - protein, 503 aa, Mus musculus
MMSISLIWGIAVVVSCCIWFIIGIRRRKVGEPPLDNGLIPYLGCALKFGSNPLEFLRAKQRKHGHVFTCKLMGKYVHFITNSLSYHKVLCHGKYFDWKKFHYTTSAKAFGHRSIDPSDGNTTENINKTFNKTLQGDALCSLSEAMMQNLQSVMRPPGLPKSKSAVWVTEGMYAFCYRVMFEAGYLTLFGKDISKTDSQRAFIQNNLDSFKQFDQVFPALVAGVPIHLFKTAHKARERLAESLKHKNLYMRDQVSELIRLRMFLNDTLSTFDDMEKAKTHLVILWASQANTIPATFWSLFQMIRSPEAMKAASEEVNGALQSAGQELSSGGNAIYLDQEQLNNLPVLDSIIKEALRLSSVSLNIRTAKEDFTLHLEDGSYNIRKDDIIALYPQLMHLDPEIYPDPLTFKYDRYLDESGKAKTTFYRNGNKLKYFYMPFGSGATICPGRLFAVQEIKQFLILMLSYFELELVESHTKCPPLDQSRAGLGILPPLNDIEFKYKLKH

SEQ ID NO: 68 - DNA, 1512 bp, Mus musculus
atgatgtctatctcattgatctggggtatcgctgttgttgtttcttgttgtatttggttcatcatcggtattagaagaagaaaggttggtgaaccaccattggataacggtttgatcccatatttgggttgtgcattgaagttcggttcaaacccattggaattcttgagagctaagcaaagaaagcatggtcatgtttttacttgtaagttaatgggtaaatacgttcatttcatcacaaactctttatcataccataaggttttgtgtcatggtaaatacttcgattggaagaaattccattacactacatctgctaaggcatttggtcatagatctattgatccatcagatggtaatactacagaaaacatcaataagacttttaataagacattgcaaggtgacgctttatgttctttgtcagaagcaatgatgcaaaatttgcaatcagttatgagaccaccaggtttgccaaaatctaaatcagctgtttgggttactgaaggcatgtacgcattctgttacagagttatgttcgaagctggttacttgactttgttcggtaaagatatctctaagacagattcacaaagagcttttattcaaaacaatttggattcttttaaacaatttgatcaagtttttccagctttagttgcaggtgttccaatccatttgtttaaaactgctcataaagcaagagaaagattagcagaatctttgaagcataagaatttgtacatgagagatcaagtttcagaattaattagattgagaatgtttttaaatgatactttgtctacattcgatgatatggaaaaggctaagacacatttggttattttgtgggcttcacaagcaaatactattccagcaacattctggtctttgttccaaatgatcagatcaccagaagctatgaaagctgcatctgaagaagttaatggtgctttacaatcagcaggtcaagaattgtcttcaggtggtaatgctatatatttggatcaagaacaattgaacaatttgccagttttggattctattattaaggaagctttgagattgtcttcagtatcattgaacatcagaactgcaaaggaagatttcacattgcatttggaagatggttcttacaacatcagaaaggatgatatcattgctttgtacccacaattgatgcacttagatccagaaatctatccagatccattgacttttaaatacgatagatacttggatgaatctggtaaagcaaaaactacattctacagaaacggtaataagttgaagtatttttacatgccatttggttcaggtgcaactatttgtccaggtagattgtttgctgttcaagaaattaaacaattcttgatcttgatgttgtcttacttcgaattggaattggttgaatcacatacaaagtgtccaccattagatcaatctagagctggtttgggtattttaccaccattgaatgatattgaattcaaatataaattgaaacattaa

SEQ ID NO: 69 - protein, 503 aa, Mus musculus
MMSISLIWGIAVVVSCCIWFIIGIRRRKVGEPPLDNGLIPYLGCALKFGSNPLEFLRAKQRKHGHVFTCKLMGKYVHFITNSLSYHKVLCHGKYFDWKKFHYTTSAKAFGHRSIDPSDGNTTENINKTFNKTLQGDALCSLSEAMMQNLQSVMRPPGLPKSKSAVWVTEGMYAFCYRVMFEAGYLTLFGKDISKTDSQRAFIQNNLDSFKQFDQVFPALVAGVPIHLFKTAHKARERLAESLKHKNLYMRDQVSELIRLRMFLNDTLSTFDDMEKAKTHLVILWASQANTIPATFWSLFQMIRSPEAMKAASEEVNGALQSAGQELSSGGNAIYLDQEQLNNLPVLDSIIKEALRLSSLSLNIRTAKEDFTLHLEDGSYNIRKDDIIALYPQLMHLDPEIYPDPLTFKYDRYLDESGKAKTTFYRNGNKLKYFYMPFGSGATICPGRLFAVQEIKQFLILMLSYFELELVESHTKCPPLDQSRAGLGILPPLNDIEFKYKLKH

SEQ ID NO: 70 - DNA, 1512 bp, Mus musculus
atgatgtctatctcattgatctggggtatcgctgttgttgtttcttgttgtatttggttcatcatcggtattagaagaagaaaggttggtgaaccaccattggataacggtttgatcccatatttgggttgtgcattgaagttcggttcaaacccattggaattcttgagagctaagcaaagaaagcatggtcatgtttttacttgtaagttaatgggtaaatacgttcatttcatcacaaactctttatcataccataaggttttgtgtcatggtaaatacttcgattggaagaaattccattacactacatctgctaaggcatttggtcatagatctattgatccatcagatggtaatactacagaaaacatcaataagacttttaataagacattgcaaggtgacgctttatgttctttgtcagaagcaatgatgcaaaatttgcaatcagttatgagaccaccaggtttgccaaaatctaaatcagctgtttgggttactgaaggcatgtacgcattctgttacagagttatgttcgaagctggttacttgactttgttcggtaaagatatctctaagacagattcacaaagagcttttattcaaaacaatttggattcttttaaacaatttgatcaagtttttccagctttagttgcaggtgttccaatccatttgtttaaaactgctcataaagcaagagaaagattagcagaatctttgaagcataagaatttgtacatgagagatcaagtttcagaattaattagattgagaatgtttttaaatgatactttgtctacattcgatgatatggaaaaggctaagacacatttggttattttgtgggcttcacaagcaaatactattccagcaacattctggtctttgttccaaatgatcagatcaccagaagctatgaaagctgcatctgaagaagttaatggtgctttacaatcagcaggtcaagaattgtcttcaggtggtaatgctatatatttggatcaagaacaattgaacaatttgccagttttggattctattattaaggaagctttgagattgtcttcactatcattgaacatcagaactgcaaaggaagatttcacattgcatttggaagatggttcttacaacatcagaaaggatgatatcattgctttgtacccacaattgatgcacttagatccagaaatctatccagatccattgacttttaaatacgatagatacttggatgaatctggtaaagcaaaaactacattctacagaaacggtaataagttgaagtatttttacatgccatttggttcaggtgcaactatttgtccaggtagattgtttgctgttcaagaaattaaacaattcttgatcttgatgttgtcttacttcgaattggaattggttgaatcacatacaaagtgtccaccattagatcaatctagagctggtttgggtattttaccaccattgaatgatattgaattcaaatataaattgaaacattaa

SEQ ID NO: 71 - protein, 503 aa, Mus musculus
MMSISLIWGIAVVVSCCIWFIIGIRRRKVGEPPLDNGLIPYLGCALKFGSNPLEFLRAKQRKHGHVFTCKLMGKYVHFITNSLSYHKVLCHGKYFDWKKFHYTTSAKAFGHRSIDPSDGNTTENINKTFNKTLQGDALCSLSEAMMQNLQSVMRPPGLPKSKSAVWVTEGMYAFCYRVMFEAGYLTLFGKDISKTDSQRAFIQNNLDSFKQFDQVFPALVAGVPIHLFKTAHKARERLAESLKHKNLYMRDQVSELIRLRMFLNDTLSTFDDMEKAKTHLVILWASQANTIPATFWSLFQMIRSPEAMKAASEEVNGALQSAGQELSSGGNAIYLDQEQLNNLPVLDSIIKEALRLSSISLNIRTAKEDFTLHLEDGSYNIRKDDIIALYPQLMHLDPEIYPDPLTFKYDRYLDESGKAKTTFYRNGNKLKYFYMPFGSGATICPGRLFAVQEIKQFLILMLSYFELELVESHTKCPPLDQSRAGLGILPPLNDIEFKYKLKH

SEQ ID NO: 72 - DNA, 1512 bp, Mus musculus
atgatgtctatctcattgatctggggtatcgctgttgttgtttcttgttgtatttggttcatcatcggtattagaagaagaaaggttggtgaaccaccattggataacggtttgatcccatatttgggttgtgcattgaagttcggttcaaacccattggaattcttgagagctaagcaaagaaagcatggtcatgtttttacttgtaagttaatgggtaaatacgttcatttcatcacaaactctttatcataccataaggttttgtgtcatggtaaatacttcgattggaagaaattccattacactacatctgctaaggcatttggtcatagatctattgatccatcagatggtaatactacagaaaacatcaataagacttttaataagacattgcaaggtgacgctttatgttctttgtcagaagcaatgatgcaaaatttgcaatcagttatgagaccaccaggtttgccaaaatctaaatcagctgtttgggttactgaaggcatgtacgcattctgttacagagttatgttcgaagctggttacttgactttgttcggtaaagatatctctaagacagattcacaaagagcttttattcaaaacaatttggattcttttaaacaatttgatcaagtttttccagctttagttgcaggtgttccaatccatttgtttaaaactgctcataaagcaagagaaagattagcagaatctttgaagcataagaatttgtacatgagagatcaagtttcagaattaattagattgagaatgtttttaaatgatactttgtctacattcgatgatatggaaaaggctaagacacatttggttattttgtgggcttcacaagcaaatactattccagcaacattctggtctttgttccaaatgatcagatcaccagaagctatgaaagctgcatctgaagaagttaatggtgctttacaatcagcaggtcaagaattgtcttcaggtggtaatgctatatatttggatcaagaacaattgaacaatttgccagttttggattctattattaaggaagctttgagattgtcttcaatatcattgaacatcagaactgcaaaggaagatttcacattgcatttggaagatggttcttacaacatcagaaaggatgatatcattgctttgtacccacaattgatgcacttagatccagaaatctatccagatccattgacttttaaatacgatagatacttggatgaatctggtaaagcaaaaactacattctacagaaacggtaataagttgaagtatttttacatgccatttggttcaggtgcaactatttgtccaggtagattgtttgctgttcaagaaattaaacaattcttgatcttgatgttgtcttacttcgaattggaattggttgaatcacatacaaagtgtccaccattagatcaatctagagctggtttgggtattttaccaccattgaatgatattgaattcaaatataaattgaaacattaa

SEQ ID NO: 73 - protein, 503 aa, Mus musculus
MMSISLIWGIAVVVSCCIWFIIGIRRRKVGEPPLDNGLIPYLGCALKFGSNPLEFLRAKQRKHGHVFTCKLMGKYVHFITNSLSYHKVLCHGKYFDWKKFHYTTSAKAFGHRSIDPSDGNTTENINKTFNKTLQGDALCSLSEAMMQNLQSVMRPPGLPKSKSAVWVTEGMYAFCYRVMFEAGYLTLFGKDISKTDSQRAFIQNNLDSFKQFDQVFPALVAGVPIHLFKTAHKARERLAESLKHKNLYMRDQVSELIRLRMFLNDTLSTFDDMEKAKTHLVILWASQANTIPATFWSLFQMIRSPEAMKAASEEVNGALQSAGQELSSGGNAIYLDQEQLNNLPVLDSIIKEALRLSSFSLNIRTAKEDFTLHLEDGSYNIRKDDIIALYPQLMHLDPEIYPDPLTFKYDRYLDESGKAKTTFYRNGNKLKYFYMPFGSGATICPGRLFAVQEIKQFLILMLSYFELELVESHTKCPPLDQSRAGLGILPPLNDIEFKYKLKH

SEQ ID NO: 74 - DNA, 1512 bp, Mus musculus
atgatgtctatctcattgatctggggtatcgctgttgttgtttcttgttgtatttggttcatcatcggtattagaagaagaaaggttggtgaaccaccattggataacggtttgatcccatatttgggttgtgcattgaagttcggttcaaacccattggaattcttgagagctaagcaaagaaagcatggtcatgtttttacttgtaagttaatgggtaaatacgttcatttcatcacaaactctttatcataccataaggttttgtgtcatggtaaatacttcgattggaagaaattccattacactacatctgctaaggcatttggtcatagatctattgatccatcagatggtaatactacagaaaacatcaataagacttttaataagacattgcaaggtgacgctttatgttctttgtcagaagcaatgatgcaaaatttgcaatcagttatgagaccaccaggtttgccaaaatctaaatcagctgtttgggttactgaaggcatgtacgcattctgttacagagttatgttcgaagctggttacttgactttgttcggtaaagatatctctaagacagattcacaaagagcttttattcaaaacaatttggattcttttaaacaatttgatcaagtttttccagctttagttgcaggtgttccaatccatttgtttaaaactgctcataaagcaagagaaagattagcagaatctttgaagcataagaatttgtacatgagagatcaagtttcagaattaattagattgagaatgtttttaaatgatactttgtctacattcgatgatatggaaaaggctaagacacatttggttattttgtgggcttcacaagcaaatactattccagcaacattctggtctttgttccaaatgatcagatcaccagaagctatgaaagctgcatctgaagaagttaatggtgctttacaatcagcaggtcaagaattgtcttcaggtggtaatgctatatatttggatcaagaacaattgaacaatttgccagttttggattctattattaaggaagctttgagattgtcttcattctcattgaacatcagaactgcaaaggaagatttcacattgcatttggaagatggttcttacaacatcagaaaggatgatatcattgctttgtacccacaattgatgcacttagatccagaaatctatccagatccattgacttttaaatacgatagatacttggatgaatctggtaaagcaaaaactacattctacagaaacggtaataagttgaagtatttttacatgccatttggttcaggtgcaactatttgtccaggtagattgtttgctgttcaagaaattaaacaattcttgatcttgatgttgtcttacttcgaattggaattggttgaatcacatacaaagtgtccaccattagatcaatctagagctggtttgggtattttaccaccattgaatgatattgaattcaaatataaattgaaacattaa

SEQ ID NO: 75 - protein, 503 aa, Mus musculus
MMSISLIWGIAVVVSCCIWFIIGIRRRKVGEPPLDNGLIPYLGCALKFGSNPLEFLRAKQRKHGHVFTCKLMGKYVHFITNSLSYHKVLCHGKYFDWKKFHYTTSAKAFGHRSIDPSDGNTTENINKTFNKTLQGDALCSLSEAMMQNLQSVMRPPGLPKSKSAVWVTEGMYAFCYRVMFEAGYLTLFGKDISKTDSQRAFIQNNLDSFKQFDQVFPALVAGVPIHLFKTAHKARERLAESLKHKNLYMRDQVSELIRLRMFLNDTLSTFDDMEKAKTHLVILWASQANTIPATFWSLFQMIRSPEAMKAASEEVNGALQSAGQELSSGGNAIYLDQEQLNNLPVLDSIIKEALRLSSATLNIRTAKEDFTLHLEDGSYNIRKDDIIALYPQLMHLDPEIYPDPLTFKYDRYLDESGKAKTTFYRNGNKLKYFYMPFGSGATICPGRLFAVQEIKQFLILMLSYFELELVESHTKCPPLDQSRAGLGILPPLNDIEFKYKLKH

SEQ ID NO: 76 - DNA, 1512 bp, Mus musculus
atgatgtctatctcattgatctggggtatcgctgttgttgtttcttgttgtatttggttcatcatcggtattagaagaagaaaggttggtgaaccaccattggataacggtttgatcccatatttgggttgtgcattgaagttcggttcaaacccattggaattcttgagagctaagcaaagaaagcatggtcatgtttttacttgtaagttaatgggtaaatacgttcatttcatcacaaactctttatcataccataaggttttgtgtcatggtaaatacttcgattggaagaaattccattacactacatctgctaaggcatttggtcatagatctattgatccatcagatggtaatactacagaaaacatcaataagacttttaataagacattgcaaggtgacgctttatgttctttgtcagaagcaatgatgcaaaatttgcaatcagttatgagaccaccaggtttgccaaaatctaaatcagctgtttgggttactgaaggcatgtacgcattctgttacagagttatgttcgaagctggttacttgactttgttcggtaaagatatctctaagacagattcacaaagagcttttattcaaaacaatttggattcttttaaacaatttgatcaagtttttccagctttagttgcaggtgttccaatccatttgtttaaaactgctcataaagcaagagaaagattagcagaatctttgaagcataagaatttgtacatgagagatcaagtttcagaattaattagattgagaatgtttttaaatgatactttgtctacattcgatgatatggaaaaggctaagacacatttggttattttgtgggcttcacaagcaaatactattccagcaacattctggtctttgttccaaatgatcagatcaccagaagctatgaaagctgcatctgaagaagttaatggtgctttacaatcagcaggtcaagaattgtcttcaggtggtaatgctatatatttggatcaagaacaattgaacaatttgccagttttggattctattattaaggaagctttgagattgtcttcagcaacattgaacatcagaactgcaaaggaagatttcacattgcatttggaagatggttcttacaacatcagaaaggatgatatcattgctttgtacccacaattgatgcacttagatccagaaatctatccagatccattgacttttaaatacgatagatacttggatgaatctggtaaagcaaaaactacattctacagaaacggtaataagttgaagtatttttacatgccatttggttcaggtgcaactatttgtccaggtagattgtttgctgttcaagaaattaaacaattcttgatcttgatgttgtcttacttcgaattggaattggttgaatcacatacaaagtgtccaccattagatcaatctagagctggtttgggtattttaccaccattgaatgatattgaattcaaatataaattgaaacattaa

SEQ ID NO: 77 - protein, 503 aa, Mus musculus
MMSISLIWGIAVVVSCCIWFIIGIRRRKVGEPPLDNGLIPYLGCALKFGSNPLEFLRAKQRKHGHVFTCKLMGKYVHFITNSLSYHKVLCHGKYFDWKKFHYTTSAKAFGHRSIDPSDGNTTENINKTFNKTLQGDALCSLSEAMMQNLQSVMRPPGLPKSKSAVWVTEGMYAFCYRVMFEAGYLTLFGKDISKTDSQRAFIQNNLDSFKQFDQVFPALVAGVPIHLFKTAHKARERLAESLKHKNLYMRDQVSELIRLRMFLNDTLSTFDDMEKAKTHLVILWASQANTIPATFWSLFQMIRSPEAMKAASEEVNGALQSAGQELSSGGNAIYLDQEQLNNLPVLDSIIKEALRLSSAVLNIRTAKEDFTLHLEDGSYNIRKDDIIALYPQLMHLDPEIYPDPLTFKYDRYLDESGKAKTTFYRNGNKLKYFYMPFGSGATICPGRLFAVQEIKQFLILMLSYFELELVESHTKCPPLDQSRAGLGILPPLNDIEFKYKLKH

SEQ ID NO: 78 - DNA, 1512 bp, Mus musculus
atgatgtctatctcattgatctggggtatcgctgttgttgtttcttgttgtatttggttcatcatcggtattagaagaagaaaggttggtgaaccaccattggataacggtttgatcccatatttgggttgtgcattgaagttcggttcaaacccattggaattcttgagagctaagcaaagaaagcatggtcatgtttttacttgtaagttaatgggtaaatacgttcatttcatcacaaactctttatcataccataaggttttgtgtcatggtaaatacttcgattggaagaaattccattacactacatctgctaaggcatttggtcatagatctattgatccatcagatggtaatactacagaaaacatcaataagacttttaataagacattgcaaggtgacgctttatgttctttgtcagaagcaatgatgcaaaatttgcaatcagttatgagaccaccaggtttgccaaaatctaaatcagctgtttgggttactgaaggcatgtacgcattctgttacagagttatgttcgaagctggttacttgactttgttcggtaaagatatctctaagacagattcacaaagagcttttattcaaaacaatttggattcttttaaacaatttgatcaagtttttccagctttagttgcaggtgttccaatccatttgtttaaaactgctcataaagcaagagaaagattagcagaatctttgaagcataagaatttgtacatgagagatcaagtttcagaattaattagattgagaatgtttttaaatgatactttgtctacattcgatgatatggaaaaggctaagacacatttggttattttgtgggcttcacaagcaaatactattccagcaacattctggtctttgttccaaatgatcagatcaccagaagctatgaaagctgcatctgaagaagttaatggtgctttacaatcagcaggtcaagaattgtcttcaggtggtaatgctatatatttggatcaagaacaattgaacaatttgccagttttggattctattattaaggaagctttgagattgtcttcagcagtattgaacatcagaactgcaaaggaagatttcacattgcatttggaagatggttcttacaacatcagaaaggatgatatcattgctttgtacccacaattgatgcacttagatccagaaatctatccagatccattgacttttaaatacgatagatacttggatgaatctggtaaagcaaaaactacattctacagaaacggtaataagttgaagtatttttacatgccatttggttcaggtgcaactatttgtccaggtagattgtttgctgttcaagaaattaaacaattcttgatcttgatgttgtcttacttcgaattggaattggttgaatcacatacaaagtgtccaccattagatcaatctagagctggtttgggtattttaccaccattgaatgatattgaattcaaatataaattgaaacattaa

SEQ ID NO: 79 - protein, 503 aa, Mus musculus
MMSISLIWGIAVVVSCCIWFIIGIRRRKVGEPPLDNGLIPYLGCALKFGSNPLEFLRAKQRKHGHVFTCKLMGKYVHFITNSLSYHKVLCHGKYFDWKKFHYTTSAKAFGHRSIDPSDGNTTENINKTFNKTLQGDALCSLSEAMMQNLQSVMRPPGLPKSKSAVWVTEGMYAFCYRVMFEAGYLTLFGKDISKTDSQRAFIQNNLDSFKQFDQVFPALVAGVPIHLFKTAHKARERLAESLKHKNLYMRDQVSELIRLRMFLNDTLSTFDDMEKAKTHLVILWASQANTIPATFWSLFQMIRSPEAMKAASEEVNGALQSAGQELSSGGNAIYLDQEQLNNLPVLDSIIKEALRLSSAALNIRTAKEDFTLHLEDGSYNIRKDDIIALYPQLMHLDPEIYPDPLTFKYDRYLDESGKAKTTFYRNGNKLKYFYMPFGSGATICPGRLFAVQEIKQFLILMLSYFELELVESHTKCPPLDQSRAGLGILPPLNDIEFKYKLKH

SEQ ID NO: 80 - DNA, 1512 bp, Mus musculus
atgatgtctatctcattgatctggggtatcgctgttgttgtttcttgttgtatttggttcatcatcggtattagaagaagaaaggttggtgaaccaccattggataacggtttgatcccatatttgggttgtgcattgaagttcggttcaaacccattggaattcttgagagctaagcaaagaaagcatggtcatgtttttacttgtaagttaatgggtaaatacgttcatttcatcacaaactctttatcataccataaggttttgtgtcatggtaaatacttcgattggaagaaattccattacactacatctgctaaggcatttggtcatagatctattgatccatcagatggtaatactacagaaaacatcaataagacttttaataagacattgcaaggtgacgctttatgttctttgtcagaagcaatgatgcaaaatttgcaatcagttatgagaccaccaggtttgccaaaatctaaatcagctgtttgggttactgaaggcatgtacgcattctgttacagagttatgttcgaagctggttacttgactttgttcggtaaagatatctctaagacagattcacaaagagcttttattcaaaacaatttggattcttttaaacaatttgatcaagtttttccagctttagttgcaggtgttccaatccatttgtttaaaactgctcataaagcaagagaaagattagcagaatctttgaagcataagaatttgtacatgagagatcaagtttcagaattaattagattgagaatgtttttaaatgatactttgtctacattcgatgatatggaaaaggctaagacacatttggttattttgtgggcttcacaagcaaatactattccagcaacattctggtctttgttccaaatgatcagatcaccagaagctatgaaagctgcatctgaagaagttaatggtgctttacaatcagcaggtcaagaattgtcttcaggtggtaatgctatatatttggatcaagaacaattgaacaatttgccagttttggattctattattaaggaagctttgagattgtcttcagcagcattgaacatcagaactgcaaaggaagatttcacattgcatttggaagatggttcttacaacatcagaaaggatgatatcattgctttgtacccacaattgatgcacttagatccagaaatctatccagatccattgacttttaaatacgatagatacttggatgaatctggtaaagcaaaaactacattctacagaaacggtaataagttgaagtatttttacatgccatttggttcaggtgcaactatttgtccaggtagattgtttgctgttcaagaaattaaacaattcttgatcttgatgttgtcttacttcgaattggaattggttgaatcacatacaaagtgtccaccattagatcaatctagagctggtttgggtattttaccaccattgaatgatattgaattcaaatataaattgaaacattaa

SEQ ID NO: 81 - protein, 369 aa, Homo sapiens
MADSAQAQKLVYLVTGGCGFLGEHVVRMLLQREPRLGELRVFDQHLGPWLEELKTGPVRVTAIQGDVTQAHEVAAAVAGAHVVIHTAGLVDVFGRASPKTIHEVNVQGTRNVIEACVQTGTRFLVYTSSMEVVGPNTKGHPFYRGNEDTPYEAVHRHPYPCSKALAEWLVLEANGRKVRGGLPLVTCALRPTGIYGEGHQIMRDFYRQGLRLGGWLFRAIPASVEHGRVYVGNVAWMHVLAARELEQRATLMGGQVYFCYDGSPYRSYEDFNMEFLGPCGLRLVGARPLLPYWLLVFLAALNALLQWLLRPLVLYAPLLNPYTLAVANTTFTVSTDKAQRHFGYEPLFSWEDSRTRTILWVQAATGSAQ

SEQ ID NO: 82 - DNA, 1110 bp, Homo sapiens
atggctgattctgcacaagctcaaaaattggtttacttagttactggtggttgtggtttcttgggtgaacatgttgttagaatgttgttacaaagagaaccaagattgggtgaattaagagtttttgatcaacatttgggtccatggttggaagaattaaaaactggtccagttagagttacagcaattcaaggtgacgttactcaagctcatgaagttgctgcagctgttgcaggtgctcatgttgttattcatacagcaggtttggttgatgtttttggtagagcttcaccaaagactatccatgaagttaacgttcaaggtacaagaaacgttattgaagcatgtgttcaaactggtacaagatttttagtttacacttcttcaatggaagttgttggtccaaatacaaaaggtcatccattctaccgtggtaacgaagatactccatacgaagctgttcatagacatccatatccatgttctaaagcattggctgaatggttggttttagaagcaaatggtagaaaagttagaggtggtttgccattagttacttgtgctttaagaccaacaggtatctatggtgaaggtcatcaaatcatgagagatttctacagacaaggtttgagattaggtggttggttgtttagagcaattccagcttcagttgaacatggtagagtttatgttggtaatgttgcatggatgcatgttttggcagctagagaattagaacaaagagctacattgatgggtggtcaagtttacttctgttacgatggttctccatacagatcatacgaagatttcaacatggaattcttgggtccatgtggtttgagattagttggtgctagaccattgttaccatactggttgttggttttcttggcagctttgaacgcattgttgcaatggttgttgagaccattggttttgtacgctccattgttgaacccatacactttagcagttgctaacactacttttactgtttctacagataaagcacaaagacatttcggttacgaaccattgttttcttgggaagattcaagaactagaacaattttatgggttcaagcagctacaggttcagctcaataa

SEQ ID NO: 83 - protein, 338 aa, Rattus norvegicus
MADSAQVPALVYLVTGGCGFLGEHIVRMLLEWEPRLRELRVFDLHLSSWLEELKTGPVQVTAIQGDVTQAHEVAAAMAGSHVVIHTAGLVDVFGKASPETIHKVNVQGTQNVIDACVQTGTRLLVYTSSMEVVGPNVKGHPFYRGNEDTPYEAIHRHPYPCSKALAEQLVLEANGRKGLRFGGRLFRAIPASVEHGRVYVGNVAWMHILVARELEQRAALMGGQVYFCYDKSPYKSYEDFNMEFLSPCGLRLIGTHPLLPYWLLVLLTALNALLQWLLRPLVLYTPLLNPYTLAVANTTFTVSTNKAQRHFGYKPLFSWEESRARTIHWVQAMEGSAW

SEQ ID NO: 84 - DNA, 1017 bp, Rattus norvegicus
atggcagattctgctcaagttccagctttggtttacttagttactggtggttgtggtttcttgggtgaacatatcgttagaatgttgttggaatgggaaccaagattgagagaattgagagttttcgatttgcatttgtcttcatggttggaagaattgaagactggtccagttcaagttacagcaattcaaggtgacgttactcaagctcatgaagttgctgcagctatggcaggttctcatgttgttattcatacagctggtttggttgatgtttttggtaaagcatcaccagaaactatccataaggttaacgttcaaggtacacaaaatgttattgatgcttgtgttcaaactggtacaagattgttagtttacacttcttcaatggaagttgttggtccaaatgttaaaggtcatccattctaccgtggtaacgaagatacaccatacgaagctattcatagacatccatatccatgttctaaagcattagctgaacaattggttttagaagctaatggtagaaaaggtttgagatttggtggtagattgtttagagcaattccagcttcagttgaacatggtagagtttatgttggtaatgttgcatggatgcatattttggttgctagagaattggaacaaagagcagctttgatgggtggtcaagtttacttctgttacgataagtctccatacaagtcatacgaagatttcaacatggaattcttgtcaccatgtggtttgagattaattggtactcatccattgttaccatactggttgttagttttgttaacagcattgaatgctttgttacaatggttgttgagaccattggttttgtacactccattgttgaacccatacacattagcagttgctaacactacttttactgtttctacaaataaggctcaaagacatttcggttacaagccattgttttcttgggaagaatcaagagcaagaacaattcattgggttcaagcaatggaaggttcagcttggtaa

SEQ ID NO: 85 - protein, 369 aa, Mus musculus
MADSAQVPTLVYLVTGGCGFLGEHIVRMLLEREPRLRELRVFDLHLSSWLEELKAGPVQVTAIQGDVTQAHEVAAAMSGSHVVIHTAGLVDVFGKASPKTIHKVNVQGTQNVIDACVQTGTQYLVYTSSMEVVGPNIKGHPFYRGNEDTPYEAVHSHPYPCSKALAEQLVLEANGRKVNGGLPLVTCALRPTGIYGEGHQVMRDFYYQGLRFGGRLFRAVPASVEHGRVYVGNVAWMHILVARELEQRAALMGGQVYFCYDKSPYKSYEDFNMEFLSPCGLRLIGAHPLLPYWLLVLLATLNALLQWLLRPLVLYTPLLNPYTLAMANTTFTVSTNKAQRHFGYKPLFSWEESRTRTIQWVQAMEGSAR

SEQ ID NO: 86 - DNA, 1110 bp, Mus musculus
atggcagattctgctcaagttccaactttggtttatttggttacaggtggttgtggtttcttgggtgaacatatcgttagaatgttgttggaaagagaaccaagattgagagaattgagagttttcgatttgcatttgtcttcatggttggaagaattaaaagcaggtccagttcaagttactgctattcaaggtgacgttacacaagctcatgaagttgctgcagctatgtctggttcacatgttgttattcatactgcaggtttagttgatgtttttggtaaagcttctccaaagactatccataaggttaacgttcaaggtacacaaaatgttattgatgcatgtgttcaaactggtacacaatatttggtttacacttcttcaatggaagttgttggtccaaacatcaagggtcatccattctaccgtggtaacgaagatacaccatacgaagctgttcattctcatccatatccatgttcaaaagcattagctgaacaattggttttggaagcaaacggtagaaaggttaacggtggtttgccattagttacttgtgctttgagaccaacaggtatctatggtgaaggtcatcaagttatgagagatttctactaccaaggtttgagattcggtggtagattgtttagagcagttccagcttctgttgaacatggtagagtttatgttggtaatgttgcatggatgcatattttggttgctagagaattggaacaaagagcagctttgatgggtggtcaagtttacttctgttacgataagtctccatacaagtcatacgaagatttcaacatggaattcttgtcaccatgtggtttgagattaattggtgctcatccattgttaccatactggttgttagttttgttagcaacattgaatgctttgttacaatggttgttgagaccattggttttgtacactccattgttgaacccatacacattagcaatggctaacactacttttactgtttctacaaataaggctcaaagacatttcggttacaagccattgttttcttgggaagaatcaagaactagaacaattcaatgggttcaagcaatggaaggttcagctagataa

SEQ ID NO: 87 - protein, 368 aa, Danio rerio
MSNNNKSKLTYVITGGCGFLGQHLLRVLLEKEKNVKEIRLFDKNVFPSLQSESTEDVKVVIIQGDITKYEDVRNAFLGADLVFHAASLVDVWYKIPEKVIFAVNVQGTENAIKACVDIGIQYLVYTSSMEVVGPNVKGDEFVRGNEDTPYNIFHEMPYPKSKAAAEKIVLEANGTKVEGGNILYTCCLRPTGIYGEQHQLMKDFYLNSVRNGGWVMRGVPPHTEHGRVYAGNVAWMHLLAARALQEHPNRLGGECYFCYDDSPYKPYDEFNMQFLSAFNFRSLRLPVWMLWIIAWMNDMVRWVLKPIYNYTPLLNKYTLAVACTSFTVSTDKAFRHFQYQPLYSWQQCLSRTQSWVNTFPFETSTKDK

SEQ ID NO: 88 - DNA, 1107 bp, Danio rerio
atgtctaacaacaataagtcaaagttgacatacgttattactggtggttgtggtttcttgggtcaacatttgttaagagttttgttggaaaaggaaaagaatgttaaggaaatcagattgtttgataaaaatgtttttccatctttgcaatctgaatcaacagaagatgttaaggttgttattatccaaggtgacatcactaagtacgaagatgttagaaacgcatttttgggtgctgatttggtttttcatgctgcatcattggttgatgtttggtacaagatcccagaaaaagttatttttgcagttaacgttcaaggtacagaaaacgcaattaaagcttgtgttgatatcggtattcaatatttggtttacacttcttcaatggaagttgttggtccaaatgttaaaggtgacgaatttgttcgtggtaacgaagatacaccatacaacatcttccatgaaatgccatacccaaaatctaaagctgcagctgaaaagattgttttggaagctaatggtactaaggttgaaggtggtaacatcttgtacacatgttgtttgagaccaactggtatctatggtgaacaacatcaattgatgaaggatttctatttgaactcagttagaaatggtggttgggttatgagaggtgttccaccacatacagaacatggtagagtttacgctggtaatgttgcttggatgcatttgttagcagctagagcattgcaagaacatccaaacagattaggtggtgaatgttacttctgttacgatgattctccatacaagccatacgatgaattcaatatgcaattcttgtctgcttttaatttcagatcattgagattaccagtttggatgttgtggattattgcttggatgaacgatatggttagatgggttttgaagccaatctataactacacaccattgttgaataagtacactttggcagttgcttgtacttcttttacagtttcaactgataaggcttttagacatttccaataccaaccattgtactcttggcaacaatgtttatctagaacacaatcatgggttaacactttcccattcgaaacttcaacaaaagataaataa

SEQ ID NO: 89 - protein, 326 aa, Homo sapiens
MDLSAASHRIPLSDGNSIPIIGLGTYSEPKSTPKGACATSVKVAIDTGYRHIDGAYIYQNEHEVGEAIREKIAEGKVRREDIFYCGKLWATNHVPEMVRPTLERTLRVLQLDYVDLYIIEVPMAFKPGDEIYPRDENGKWLYHKSNLCATWEAMEACKDAGLVKSLGVSNFNRRQLELILNKPGLKHKPVSNQVECHPYFTQPKLLKFCQQHDIVITAYSPLGTSRNPIWVNVSSPPLLKDALLNSLGKRYNKTAAQIVLRFNIQRGVVVIPKSFNLERIKENFQIFDFSLTEEEMKDIEALNKNVRFVELLMWRDHPEYPFHDEY

SEQ ID NO: 90 - DNA, 981 bp, Homo sapiens
atggatttgtctgctgcatcacatagaattccattgtctgatggtaactcaatcccaatcatcggtttgggtacttattctgaaccaaaatcaacaccaaaaggtgcttgtgcaacttctgttaaagttgctattgatacaggttacagacatatcgatggtgcatacatctatcaaaacgaacatgaagttggtgaagctattagagaaaagattgcagagggtaaagttagaagagaagatattttctattgtggtaaattgtgggctactaatcatgttccagaaatggttagaccaactttggaaagaacattgagagttttgcaattggattacgttgatttgtacatcatcgaagttccaatggcttttaaaccaggtgacgaaatctatccaagagatgaaaacggtaaatggttgtaccataagtctaatttgtgtgctacatgggaagctatggaagcttgtaaggatgcaggtttagttaaatctttgggtgtttcaaacttcaacagaagacaattggaattgatcttgaataagccaggtttgaagcataagccagtttcaaaccaagttgaatgtcatccatacttcactcaaccaaagttgttgaagttttgtcaacaacatgatatcgttatcacagcttactctccattgggtacttcaagaaatccaatttgggttaatgtttcttcaccaccattgttgaaggatgcattgttgaactctttaggtaaaagatacaataagacagctgcacaaatcgttttgagattcaatatccaaagaggtgttgttgttattccaaaatcttttaatttggaaagaattaaagaaaacttccaaatcttcgatttttcattaactgaagaagaaatgaaggatatcgaagctttgaataagaacgttagattcgttgaattgttaatgtggagagatcatccagaatatccatttcatgatgaatactaa

SEQ ID NO: 91 - protein, 325 aa, Mus musculus
MNLSAAHHQISLSDGNNIPLIGLGTYSDPRPVPGKTYVAVKTAIDEGYRHIDGAYVYHNEHEVGEAIREKIAEGKVKREEIFYCGKLWNTEHVPSMVLPALERTLKALKLDYIDLYIIELPMAFKPGKEIYPRDENGRIIYDKTNLCATWEALEACKDAGLVKSLGVSNFNRRQLELILNKPGLKYKPVTNQVECHPYFTQTKLLKFCQQHDIVIVAHSPLGTCRNPSWVNVSSPPLLNDELLTSLGKKYNKTQAQIVLRFNIQRGIVVIPKSFTPERIKENFQIFDFSLTEEEMKDIDALNKNVRYVELLMWSDHPEYPFHDEY

SEQ ID NO: 92 - DNA, 978 bp, Mus musculus
atgaatttgtctgctgcacatcatcaaatctctttgtcagatggtaacaacatcccattgatcggtttgggtacttattcagatccaagaccagttccaggtaaaacttacgttgctgttaaaacagcaattgatgaaggttacagacatatcgatggtgcttacgtttaccataatgaacatgaagttggtgaagctattagagaaaagattgcagagggtaaagttaagagagaagaaattttctattgtggtaaattgtggaacactgaacatgttccatctatggttttaccagctttggaaagaacattgaaggcattgaagttggattacatcgatttgtacatcatcgaattgccaatggcttttaaacctggtaaagaaatctatccaagagatgaaaacggtagaatcatctatgataagactaatttgtgtgctacatgggaagctttggaagcttgtaaggatgcaggtttagttaaatctttgggtgtttcaaacttcaacagaagacaattggaattgatcttgaataagccaggtttaaagtacaagccagttactaaccaagttgaatgtcatccatacttcactcaaacaaagttgttgaagttttgtcaacaacatgatatcgttatcgttgctcattctccattgggtacatgtagaaatccatcatgggttaatgtttcttcaccaccattgttgaacgatgaattgttgacttctttgggtaaaaagtacaataagacacaagcacaaatcgttttgagattcaatatccaaagaggtatcgttgttattccaaagtcttttactccagaaagaattaaagaaaacttccaaatcttcgatttttcattaacagaagaagaaatgaaggatatcgatgctttgaataagaacgttagatacgttgaattgttaatgtggtcagatcatccagaatatccatttcatgatgaatactaa

SEQ ID NO: 93 - protein, 326 aa, Rattus norvegicus
MNLSTANHHIPLNDGNSIPIIGLGTYSDPRPVPGKTFIAVKTAIDEGYRHIDGAYVYRNEHEVGEAIREKVAEGKVKREEIFYCGKLWSTDHDPEMVRPALERTLQTLKLDYIDLYIIEMPMAFKPGEEFYPKDENGRVIYHKSNLCATWEALEACKDAGLVKSLGVSNFNRRQLEVILNKPGLKYKPVTNQVECHPYFTQTKLLEVSASSMTSFIVAYSPLGTCRNPLWVNVSSPPLLKDELLTSLGKKYNKTQAQIVLRFDIQRGLVVIPKSTTPERIKENFQIFDFSLTKEEMKDIEALNKNVRFVEMLMWSDHPEYPFHDEY

SEQ ID NO: 94 - DNA, 981 bp, Rattus norvegicus
atgaatttgtctactgctaaccatcatatcccattgaacgatggtaactcaatcccaatcattggtttgggtacatattctgatccaagaccagttccaggtaaaacttttattgctgttaagacagcaatcgatgaaggttacagacatattgatggtgcttatgtttacagaaatgaacatgaagttggtgaagctattagagaaaaagttgcagagggtaaagttaagagagaagaaattttctattgtggtaaattgtggtcaactgatcatgatccagaaatggttagaccagctttggaaagaactttacaaacattgaagttggattacatcgatttgtacatcatcgaaatgccaatggcttttaaaccaggtgaagaattctacccaaaagatgaaaacggtagagttatatatcataagtctaatttgtgtgctacttgggaagctttagaagcatgtaaagatgcaggtttggttaagtctttgggtgtttcaaacttcaacagaagacaattggaagttattttgaataagccaggtttaaagtacaagccagttacaaaccaagttgaatgtcatccatacttcactcaaacaaagttgttggaagtttctgcttcttcaatgacttcttttattgttgcatattctccattgggtacatgtagaaatccattatgggttaatgtttcttcaccaccattgttgaaggatgaattgttgacttcattgggtaaaaagtacaataagacacaagctcaaatcgttttgagattcgatatccaaagaggtttagttgttattccaaagtcaactacaccagaaagaattaaagaaaacttccaaatcttcgatttttctttaacaaaagaagaaatgaaagatattgaagcattgaataagaatgttagatttgttgaaatgttaatgtggtctgatcatccagaatatccatttcatgatgaatactaa

SEQ ID NO: 95 - protein, 326 aa, Oryctolagus cuniculus
MDLSATNHRIPLGDGNSIPIIGLGTYSEPKTTPKGSCATSVKIAIDTGYRHIDGAYIYQNEHEVGETFREKIAEGKVRREDIFYCGKLWATNHDPVMVRPTLERTLKVLKLDYIDLYIIEIPMAFKPGDVVYPRDENGKWLYHKTNLCATWEALEACKDAGLVKSLGVSNFNRQQLELLLNKPGLKHKPVCNQVECHPYFTQPKLLKFCQQHDIIIVAYSPLGTCRNPMWVNTSLPPLLKDTLLNSLGKKYKKTAAQIVLRFNVQRGVVVIPKSFNPERIKENFQIFDFSLTEEEMKDIEALNKNVRYVELLMWRDHPEYPFNDEY

SEQ ID NO: 96 - DNA, 981 bp, Oryctolagus cuniculus
atggatttgtctgctacaaatcatagaattccattgggtgacggtaactctatcccaatcatcggtttgggtacttattcagaaccaaaaactacaccaaaaggttcttgtgctacttcagttaagatcgcaatcgatacaggttacagacatatcgatggtgcatacatctatcaaaacgaacatgaagttggtgaaacttttagagaaaagattgctgagggtaaagttagaagagaagatattttctattgtggtaaattgtgggcaactaatcatgatccagttatggttagaccaactttggaaagaacattgaaggttttgaagttggattatattgatttgtacatcatcgaaatcccaatggcttttaaaccaggtgacgttgtttacccaagagatgaaaacggtaaatggttgtaccataagactaatttgtgtgctacatgggaagctttggaagcttgtaaggatgcaggtttagttaaatctttgggtgtttcaaacttcaacagacaacaattggaattgttgttgaataagccaggtttgaagcataagccagtttgtaaccaagttgaatgtcatccatacttcacacaaccaaagttattgaagttttgtcaacaacatgatatcatcatcgttgcttactcaccattaggtacttgtagaaatccaatgtgggttaacacatctttaccaccattattgaaggatactttgttgaactcattgggtaaaaagtacaagaaaactgctgcacaaatcgttttgagattcaatgttcaaagaggtgttgttgttattccaaaatcttttaatccagaaagaattaaagaaaacttccaaatcttcgatttttcattaactgaagaagaaatgaaggatatcgaagcattgaataagaacgttagatacgttgaattattgatgtggagagatcatccagaatacccttttaatgatgaatactaa

SEQ ID NO: 97 - protein, 322 aa, Rattus norvegicus
MDSISLRVALNDGNFIPVLGFGTTVPEKVAKDEVIKATKIAIDNGFRHFDSAYLYEVEEEVGQAIRSKIEDGTVKREDIFYTSKLWSTFHRPELVRTCLEKTLKSTQLDYVDLYIIHFPMALQPGDIFFPRDEHGKLLFETVDICDTWEAMEKCKDAGLAKSIGVSNFNCRQLERILNKPGLKYKPVCNQVECHLYLNQSKMLDYCKSKDIILVSYCTLGSSRDKTWVDQKSPVLLDDPVLCAIAKKYKQTPALVALRYQLQRGVVPLIRSFNAKRIKELTQVFEFQLASEDMKALDGLNRNFRYNNAKYFDDHPNHPFTDE

SEQ ID NO: 98 - DNA, 969 bp, Rattus norvegicus
atggattctatctcattgagagttgctttgaacgatggtaacttcatcccagttttgggttttggtactacagttccagaaaaggttgcaaaggatgaagttattaaagctactaagattgcaattgataacggttttagacatttcgattctgcttatttgtacgaagttgaagaagaagttggtcaagcaatcagatcaaagatcgaagatggtactgttaagagagaagatattttctatacttctaagttgtggtcaacattccatagaccagaattagttagaacatgtttggaaaagactttgaagtctacacaattggattacgttgatttgtacatcatccatttcccaatggctttgcaaccaggtgacattttctttccaagagatgaacatggtaaattgttgttcgaaactgttgatatctgtgatacatgggaagcaatggaaaagtgtaaggatgctggtttggcaaagtctatcggtgtttcaaacttcaactgtagacaattggaaagaattttaaataagccaggtttgaagtacaagccagtttgtaaccaagttgaatgtcatttgtatttgaatcaatctaaaatgttggattactgtaagtctaaggatatcattttggtttcatactgtactttaggttcttcaagagataaaacatgggttgatcaaaaatcaccagttttgttagatgatccagttttgtgtgctatcgctaagaaatacaagcaaactccagctttggttgcattaagataccaattgcaaagaggtgttgttccattgatcagatcttttaatgctaagagaattaaagaattgacacaagttttcgaattccaattggcttcagaagatatgaaggcattggatggtttgaacagaaacttcagatacaacaatgctaaatactttgatgatcatccaaatcatccttttactgatgaataa

SEQ ID NO: 99 - protein, 323 aa, Homo sapiens
MDPKYQRVELNDGHFMPVLGFGTYAPPEVPRNRAVEVTKLAIEAGFRHIDSAYLYNNEEQVGLAIRSKIADGSVKREDIFYTSKLWCTFFQPQMVQPALESSLKKLQLDYVDLYLLHFPMALKPGETPLPKDENGKVIFDTVDLSATWEVMEKCKDAGLAKSIGVSNFNCRQLEMILNKPGLKYKPVCNQVECHPYLNQSKLLDFCKSKDIVLVAHSALGTQRHKLWVDPNSPVLLEDPVLCALAKKHKQTPALIALRYQLQRGVVVLAKSYNEQRIRENIQVFEFQLTSEDMKVLDGLNRNYRYVVMDFLMDHPDYPFSDEY

SEQ ID NO: 100 - DNA, 972 bp, Homo sapiens
atggacccaaagtaccaaagagttgaattgaacgatggtcatttcatgccagttttaggttttggtacttacgctccaccagaagttccaagaaacagagcagttgaagttacaaaattggctattgaagcaggttttagacatatcgattctgcttatttgtacaacaacgaagaacaagttggtttagctatcagatcaaagattgcagatggttcagttaagagagaagatattttctatacttcaaaattgtggtgtactttctttcaaccacaaatggttcaaccagctttggaatcttctttgaagaaattgcaattggattatgttgatttgtacttgttacattttccaatggcattgaaaccaggtgaaactccattaccaaaggatgaaaacggtaaagttattttcgatactgttgatttgtctgcaacatgggaagttatggaaaagtgtaaggatgctggtttagcaaagtctatcggtgtttcaaacttcaactgtagacaattggaaatgatcttgaataagccaggtttgaagtacaaaccagtttgtaaccaagttgaatgtcatccatacttaaaccaatctaaattgttagatttttgtaagtcaaaggatattgttttggttgctcattctgcattaggtactcaaagacataaattgtgggttgatccaaattcaccagttttgttagaagatccagttttgtgtgctttggctaagaaacataaacaaacaccagctttgattgcattaagataccaattgcaaagaggtgttgttgttttagctaaatcttacaatgaacaaagaattagagaaaacatccaagttttcgaatttcaattgacatcagaagatatgaaagttttggatggtttgaacagaaactatagatacgttgttatggatttcttgatggatcatccagattatccattttcagatgaatactaa

SEQ ID NO: 101 - protein, 323 aa, Macaca fuscata
MDPKYQRVALNDGHFMPVLGFGSYAPPEVPRNRVVEVTKLAIEAGFRHIDSAYLYNNEEQVGLAIRSKIADGSVKREDIFYTSKLWCTFFRPQLVQPALESSLKKLQLDYVDLYLIHFPMALKPGETPLPKDENGKVMFDTVDLCAIWEAMEKCKDAGLAKSIGVSNFNRRQLEMILNNPGLKYKPVCNQVECHPYLNQSKLLDFCKSKDIVLVAHSALGTQRHKLWVDQNSPALLEDPVLCALAKKHKRSPALIALRYQLQRGVVVLAKSYNEQRIRENVQVFEFQLTSEDMKVLDDLNRNFRYVVMDFLVDHPDYPFSDEY

SEQ ID NO: 102 - DNA, 972 bp, Macaca fuscata
atggacccaaaatatcaaagagttgctttgaatgatggtcattttatgccagttttaggttttggttcttacgcaccaccagaagttccaagaaacagagttgttgaagttactaaattggctattgaagcaggttttagacatatcgattcagcttatttgtacaacaacgaagaacaagttggtttagctatcagatcaaagattgcagatggttcagttaagagagaagatattttctatacttctaaattgtggtgtactttctttagaccacaattagttcaaccagctttggaatcttctttgaagaaattgcaattggattacgttgatttgtacttaatccatttcccaatggcattgaagccaggtgaaactccattaccaaaggatgaaaacggtaaagttatgttcgatacagttgatttgtgtgctatttgggaagcaatggaaaagtgtaaggatgctggtttagcaaagtctattggtgtttcaaattttaatagaagacaattggaaatgatcttgaacaacccaggtttgaagtacaaaccagtttgtaaccaagttgaatgtcatccatacttaaaccaatctaaattgttagatttttgtaagtcaaaggatattgttttggttgctcattctgcattaggtactcaaagacataaattgtgggttgatcaaaattcaccagctttgttagaagatccagttttgtgtgctttggctaagaaacataaaagatcaccagctttgattgcattaagataccaattgcaaagaggtgttgttgttttagcaaaatcttacaatgaacaaagaattagagaaaacgttcaagttttcgaatttcaattgacatcagaagatatgaaggttttggatgatttgaacagaaacttcagatacgttgttatggatttcttggttgatcatccagattatccattttcagatgaatactaa

SEQ ID NO: 103 - protein, 323 aa, Bos taurus
MDPKGQKVKLNDGHFIPVLGFGTYAPQEVAKRDALEFTPFAIEVGFRHIDCAHAYQNEEQIGQAIRSKMADGTVKREDIFCTSKLWCTSFRPELVRPALEKSLKSLQLDYVDLYIMHYPLALKPGEELYPKDENGKLIADSVDFCLTWEALEKCKDAGLAKSIGVSNFNHKQLEKILNKPGLKYKPVCNQVECHPYLNQRKLLDFCKSHDIVLVAYSALGSQRVKGWVNPNHPVLLEDPVLSAIAQKHKKTAALVALRYQIQRGVVVLAKGNNKEWIKENMQVFDFELTPEDMKAIDGLNRNIRYCDFHPGVGHPEFPFSEEY

SEQ ID NO: 104 - DNA, 972 bp, Bos taurus
atggacccaaagggtcaaaaggttaaattgaacgatggtcatttcattccagttttgggtttcggtacttacgctccacaagaagttgctaaaagagatgctttggagtttactccattcgcaatcgaagttggttttagacatatcgattgtgctcatgcatatcaaaacgaagaacaaatcggtcaagctatcagatcaaagatggcagatggtactgttaagagagaagatattttctgtacttctaaattgtggtgtacttcttttagaccagaattagttagaccagctttggaaaaatctttaaaatcattgcaattggattatgttgatttgtacatcatgcattacccattggctttgaagccaggtgaagaattgtacccaaaggatgaaaacggtaaattaatcgctgattcagttgatttttgtttgacatgggaagcattagaaaagtgtaaggatgctggtttagcaaagtctattggtgtttcaaacttcaaccataagcaattggaaaagattttgaataagccaggtttgaagtacaaaccagtttgtaaccaagttgaatgtcatccatatttgaaccaaagaaaattgttagatttttgtaagtctcatgatattgttttggttgcttactctgcattaggttcacaaagagttaaaggttgggttaatccaaatcatccagttttgttagaagatccagttttgtcagctattgcacaaaaacataagaaaactgctgctttggttgctttaagataccaaattcaaagaggtgttgttgttttagcaaagggtaacaataaggaatggatcaaggaaaacatgcaagttttcgatttcgaattgacaccagaagatatgaaagctatcgatggtttgaacagaaacatcagatactgtgattttcatccaggtgttggtcatccagaatttccattttctgaagaatattaa

SEQ ID NO: 105 - protein, 323 aa, Callithrix jacchus
MDSKHRCMKLNDGHFMPVLGFGTYAPAEVPKSKAAEATKWAIEAGFRHIDSAHCYNNEEHVGLAIRNKIADGSVKRDDIFYTSKLWCTSHRPELVRPALERSLRKLQLDYVDLYLIHFPVSLKPSEELIPKDENGKILLDTVDLCATWEAMEKCKDAGLAKSIGVSNFNRRQLEMILNKPGLRYKPVCNQVECHPYLNQRKLLDFCKSKDIVLVAYSALGSHREKAWVDQNCPVLLEDPVLCALAKKHKRSPALIALRYQLQRGAVVLAKSYNEQRIRENMQVFEFQLTSEDMKTIDGLNKNVRYITLHVLADHPSYPFSDEY

SEQ ID NO: 106 - DNA, 972 bp, Callithrix jacchus
atggattctaagcatagatgtatgaaattgaacgatggtcatttcatgccagttttaggttttggtacttatgctccagcagaagttccaaaatctaaagctgcagaagctacaaaatgggctattgaagcaggttttagacatatcgattcagcacattgttacaacaacgaagaacatgttggtttggctattagaaataagattgcagatggttctgttaagagagatgatattttctatacttctaaattgtggtgtacatcacatagaccagaattagttagaccagctttggaaagatcattaagaaaattgcaattggattatgttgatttgtacttaatccatttcccagtttctttgaagccatcagaagaattaatcccaaaggatgaaaacggtaaaattttgttagatactgttgatttgtgtgctacatgggaagcaatggaaaagtgtaaggatgctggtttagcaaagtctatcggtgtttcaaacttcaacagaagacaattggaaatgatcttgaataagccaggtttgagatacaaaccagtttgtaaccaagttgaatgtcatccatacttaaaccaaagaaaattgttagatttttgtaaatctaaagatattgttttggttgcttattctgcattaggttcacatagagaaaaagcatgggttgatcaaaattgtccagttttgttagaagatccagttttgtgtgctttggctaagaaacataaaagatcaccagctttgattgcattaagataccaattgcaaagaggtgctgttgttttagcaaaatcttacaacgaacaaagaattagagaaaacatgcaagttttcgaatttcaattgacttcagaagatatgaaaacaattgatggtttgaataagaacgttagatacatcactttgcatgttttagctgatcatccatcttatccattttcagatgaatactaa

SEQ ID NO: 107 - protein, 326 aa, Bactrocera latifrons
MAFNKFLRLSNGPDMPAFGLRLYQVKRDDVSVVLNDAIEAGYRLFETSPSYNNQNDVGDVLTAWLKGNKIKREELFIVTNLPVSNNRPHEVEDTLKESLRKLQLDYVDLYLVEAPFAIKMENEEVFKRDSAGNALLEEATDHVAIWEIMEELMSTGLTKSIGLGNFNVDQIQHIVETRKMIPHVLQIEYHVYLQQPELIDYCRSTNITLLTYAALGAVNKPDKYQRVSVLGKDEIPILDLPELREIAATHKKTPAQVAFRWVIDKKMALTVKSSNAERIRSNIDIFDFSLTKEEMEKLNALNRNRRFVDFSQYKGIEKHPDYPFHM

SEQ ID NO: 108 - DNA, 981 bp, Bactrocera latifrons
atggcttttaataagttcttgagattgtctaacggtccagatatgccagcattcggtttgagattgtaccaagttaagagagatgatgtttcagttgttttgaatgatgctatcgaagcaggttatagattattcgaaacatctccatcatacaacaaccaaaacgatgttggtgacgttttgactgcttggttaaaaggtaataagattaaaagagaagaattgtttattgttacaaatttgccagtttctaataatagaccacatgaagttgaagatactttgaaggaatcattaagaaaattgcaattagattatgttgatttgtacttagttgaagctccatttgcaattaaaatggaaaacgaagaagtttttaaaagagattctgctggtaatgcattgttagaagaagctacagatcatgttgcaatttgggaaattatggaagaattgatgtctactggtttgacaaagtcaatcggtttgggtaacttcaacgttgatcaaatccaacatattgttgaaactagaaaaatgattccacatgttttgcaaatcgaataccatgtttacttgcaacaaccagaattaatcgattactgtagatcaactaacatcacattgttgacttacgctgcattgggtgctgttaataagcctgataagtaccaaagagtttcagttttgggtaaagatgaaatcccaattttggatttgccagaattaagagaaattgctgcaacacataagaaaactccagctcaagttgcttttagatgggttattgataagaaaatggctttgacagttaaatcttcaaacgcagaaagaattagatcaaacatcgatattttcgatttttcattaactaaagaagaaatggaaaaattgaatgcattaaatagaaatagaagatttgttgatttttcacaatacaagggtatcgaaaagcatccagattacccatttcacatgtaa

SEQ ID NO: 109 - protein, 323 aa, Callithrix jacchus
MDPRCQRVELNDGHFMPVLGFGTYAPPEVPRNRVVEVTKFAIEAGFRHLDSAYIYNNEEQVGLAIQSKIADGSVKREDIFCTSKLWCTSHRPELVQSALESSLKQLQLDYVDLYLVHFPVALKPGEDILPKDENGKVIFDTVDLCATWEAMEKCKDAGLAKSIGVSNFNRRQLEMILNKPGLRYKPVCNQVECHPYLNQSKLLDFCKSKDIVLVAHSALGTQRHELWVDQSSPVLLEDPVLCALAKKHKRSPALIALRYQLQRGVVVLAKSYNEQRIRENVQVSEFQLSSADMKVLDGLNRNFRYVTLDYLAGHPNYPFRDFF

SEQ ID NO: 110 - DNA, 972 bp, Callithrix jacchus
atggacccaagatgtcaaagagttgaattgaacgatggtcatttcatgccagttttaggttttggtacttatgctccaccagaagttccaagaaacagagttgttgaagttacaaagttcgctatcgaagcaggttttagacatttggattctgcatacatctataacaacgaagaacaagttggtttagctatccaatctaagatcgcagatggttcagttaagagagaagatattttctgtacttctaaattgtggtgtacatcacatagaccagaattagttcaatctgctttggaatcttcattaaagcaattgcaattggattatgttgatttgtacttagttcattttccagttgcattgaaaccaggtgaagatattttaccaaaggatgaaaacggtaaagttattttcgatactgttgatttgtgtgctacatgggaagcaatggaaaagtgtaaggatgctggtttagcaaagtctatcggtgtttcaaacttcaacagaagacaattggaaatgatcttgaataagccaggtttgagatacaaaccagtttgtaaccaagttgaatgtcatccatacttaaaccaatctaaattgttagatttttgtaagtcaaaggatattgttttggttgctcattctgcattaggtactcaaagacatgaattgtgggttgatcaatcttcaccagttttgttagaagatccagttttgtgtgctttggctaagaaacataaaagatcaccagctttgattgcattaagataccaattgcaaagaggtgttgttgttttagctaaatcttacaatgaacaaagaattagagaaaacgttcaagtttcagaatttcaattatcttcagctgatatgaaagttttggatggtttgaacagaaacttcagatacgttacattggattacttagcaggtcatccaaattacccttttagagatttcttttaa

SEQ ID NO: 111 - protein, 297 aa, Macaca mulatta
MDSKHQRVKLNDGHFMPVLGFGTYAPVEVPKDKALEATKLAIEVGFRHVDCAYAYNNEEYVGLAIRSKIADGTVKREDIFYTSKLWCNSHRPELVRPALERSLKNLQLDYVDLYLIHSPVSLKAMEKCKDAGLAKSIGVSNFNRRQLEMILNKPGLKYKPVCNQVECHPYFNQRKLLDFCKSKDIVLVAFSALGSHREKQWVDQNSPVLLEDPVLCALAKKHKQTPALIALRYQLQRGVVVLAKSYTEQRIRENMKVFEFQLTSEDMKAIDGLDRNIRYLTLDILADSPNYPYSDEY

SEQ ID NO: 112 - DNA, 894 bp, Macaca mulatta
atggattctaagcatcaaagagttaaattgaacgatggtcatttcatgccagttttaggttttggtacttatgctccagttgaagttccaaaggataaagcattggaagcaacaaaattagcaatcgaagttggttttagacatgttgattgtgcttatgcatacaacaacgaagaatacgttggtttggctatcagatcaaagattgcagatggtactgttaagagagaagatattttctatacatctaaattgtggtgtaactcacatagaccagaattagttagaccagctttggaaagatcattgaaaaatttgcaattggattatgttgatttgtacttaatccattctccagtttcattgaaggcaatggaaaagtgtaaggatgctggtttagcaaagtctatcggtgtttcaaacttcaacagaagacaattggaaatgatcttgaataagccaggtttgaagtacaaaccagtttgtaaccaagttgaatgtcatccatacttcaaccaaagaaaattgttagatttttgtaaatctaaagatattgttttggttgctttttctgcattaggttcacatagagaaaagcaatgggttgatcaaaattcaccagttttgttagaagatccagttttgtgtgctttggctaagaaacataaacaaactccagctttgattgcattaagataccaattgcaaagaggtgttgttgttttagctaaatcttacactgaacaaagaattagagaaaacatgaaggttttcgaatttcaattgacatcagaagatatgaaggctatcgatggtttagatagaaacatcagatatttgacattagatattttggcagattctccaaactatccatactcagatgaatactaa

SEQ ID NO: 113 - protein, 309 aa, Macaca mulatta
MDSKHQRVKLNDGHFMPVLGFGTYAPVEVPKDKALEATKLAIEVGFRHVDCAYAYNNEEYVGLAIRSKIADGTVKREDIFYTSKLWCNSHRPELVRPALERSLKNLQLDYVDLYLIHSPVSLKPGEELIPKDENGKVLFDTVDLCATWEAMEKCKDAGLAKSIGVSNFNRRQLEMILNKPGLKYKPVCNQVECHPYFNQRKLLDFCKSKDIVLVAFSALGSHREKQWVDQNSPVLLEDPVLCALAKKHKQTPALIALRYQLQRGVVVLAKSYTEQRIRENMKVFEFQLTSEDMKAIDGLDRNIRYLTLD

SEQ ID NO: 114 - DNA, 927 bp, Macaca mulatta
atggattctaagcatcaaagagttaaattgaacgatggtcatttcatgccagttttaggttttggtacttatgctccagttgaagttccaaaggataaagcattggaagcaacaaaattagcaatcgaagttggttttagacatgttgattgtgcttatgcatacaacaacgaagaatacgttggtttggctatcagatcaaagattgcagatggtactgttaagagagaagatattttctatacatctaaattgtggtgtaactcacatagaccagaattagttagaccagctttggaaagatcattgaaaaatttgcaattggattatgttgatttgtacttaatccattctccagtttcattgaagccaggtgaagaattaatcccaaaggatgaaaacggtaaagttttgttcgatactgttgatttgtgtgctacatgggaagcaatggaaaaatgtaaagatgctggtttggcaaagtctatcggtgtttcaaacttcaacagaagacaattggaaatgatcttgaataagccaggtttgaagtacaaaccagtttgtaaccaagttgaatgtcatccatacttcaaccaaagaaaattgttagatttttgtaaatctaaagatattgttttggttgctttttctgcattaggttcacatagagaaaagcaatgggttgatcaaaattcaccagttttgttagaagatccagttttgtgtgctttggctaagaaacataaacaaactccagctttgattgcattaagataccaattgcaaagaggtgttgttgttttagctaaatcttacactgaacaaagaattagagaaaacatgaaggttttcgaatttcaattgacatcagaagatatgaaggcaatcgatggtttagatagaaatattagatacttgacattagat

SEQ ID NO: 115 - protein, 323 aa, Macaca mulatta
MDPKYQRVALNDGHFMPVLGFGSYAPPEVPRNRVVEVTKLAIEAGFRHIDSAYLYNNEEQVGLAIRSKIADGSVKREDIFYTSKLWCTFFRPQLVQPALESSLKKLQLDYVDLYLIHFPMALKPGETPLPKDENGKVMFDTVDLCAIWEAMEKCKDAGMAKSIGVSNFNRRQLEMILNNPGLKYKPVCNQVECHPYFNQRKLLDFCKSKDIVLVAFSALGSHREKQWVDQNSPVLLEDPVLCALAKKHKQTPALIALRYQLQRGVVVLAKSYTEQRIRENMKVFEFQLTSEDMKAIDGLDRNIRYLTLDILADSPNYPYSDEY

SEQ ID NO: 116 - DNA, 975 bp, Macaca mulatta
atggacccaaaatatcaaagagttgctttgaatgatggtcattttatgccagttttaggttttggttcttacgcaccaccagaagttccaagaaacagagttgttgaagttactaaattggctattgaagcaggttttagacatatcgattcagcttatttgtacaacaacgaagaacaagttggtttagctatcagatcaaagattgcagatggttcagttaagagagaagatattttctatacttctaaattgtggtgtactttctttagaccacaattagttcaaccagctttggaatcttctttgaagaaattgcaattggattacgttgatttgtacttaatccatttcccaatggcattgaagccaggtgaaactccattaccaaaggatgaaaacggtaaagttatgttcgatacagttgatttgtgtgctatttgggaagcaatggaaaaatgtaaagatgctggtatggcaaaatctattggtgtttcaaattttaatagaagacaattggaaatgatcttgaacaacccaggtttgaagtacaaaccagtttgtaaccaagttgaatgtcatccatacttcaaccaaagaaaattgttagatttttgtaaatctaaagatattgttttggttgctttttctgcattaggttcacatagagaaaagcaatgggttgatcaaaattcaccagttttgttagaagatccagttttgtgtgctttggctaagaaacataaacaaactccagctttgattgcattaagataccaattgcaaagaggtgttgttgttttagctaaatcttacactgaacaaagaattagagaaaacatgaaggttttcgaatttcaattgacatcagaagatatgaaggctatcgatggtttagatagaaacatcagatatttgacattagatattttggcagattctccaaactacccatactcagatgaatactaataa

SEQ ID NO: 117 - protein, 139 aa, Macaca mulatta
MDSKHQRVKLNDGHFMPVLGFGTYAPVEVPKDKALEATKLAIEVGFRHVDCAYAYNNEEYVGLAIRSKIADGTVKREDIFYTSKLWCNSHRPELVRPALERSLKNLQLDYVDLYLIHSPVSLKEDIGIIMWKKSPKHNS

SEQ ID NO: 118 - DNA, 420 bp, Macaca mulatta
atggattctaagcatcaaagagttaaattgaacgatggtcatttcatgccagttttaggttttggtacttatgctccagttgaagttccaaaggataaagcattggaagcaacaaaattagcaatcgaagttggttttagacatgttgattgtgcttatgcatacaacaacgaagaatacgttggtttggctatcagatcaaagattgcagatggtactgttaagagagaagatattttctatacatctaaattgtggtgtaactcacatagaccagaattagttagaccagctttggaaagatcattgaaaaatttgcaattggattatgttgatttgtacttaatccattctccagtttcattaaaggaagatattggtatcatcatgtggaagaaatctccaaagcataattcataa

SEQ ID NO: 119 - protein, 323 aa, Pongo abelii
MDSKHQCVKLNDGHFMPVLGFGTYAPPEVPRNRAVEVTKLAIEAGFRHIDSAYLYDNEEQVGLAIRSKIADGSVKREDIFYTSKLWCTFFQPQMVQPALESSLKKLQLDYVDLYLLHFPMALKPGEMLLPKDENGKVIFDTVDLCATWEVMEKCKDAGLAKSIGVSNFNRRQLEMILNKPGLKYKPVCNQVECHPYLNQSKLLDFCKSKDIALVAYSALGTQRHELWVDPNSPVLLEDPVLCALAKKHKRTPALIALRYQLQRGVVVLAKSYNEQRIRENIQVFEFQLTSEDMKVLDGLNRNYRYIVMDFLMDHPDYPFSDEY

SEQ ID NO: 120 - DNA, 972 bp, Pongo abelii
atggattctaagcatcaatgtgttaaattgaacgatggtcatttcatgccagttttaggttttggtacttatgcaccaccagaagttccaagaaacagagctgttgaagttacaaaattggctattgaagcaggttttagacatatcgattctgcatatttgtacgataacgaagaacaagttggtttagcaatcagatcaaagattgctgatggttcagttaagagagaagatattttctatacttcaaaattgtggtgtactttctttcaaccacaaatggttcaaccagctttggaatcttctttgaagaaattgcaattggattatgttgatttgtacttgttgcatttcccaatggctttgaagccaggtgaaatgttgttgccaaaggatgaaaacggtaaagttattttcgatactgttgatttgtgtgctacatgggaagttatggaaaagtgtaaggatgctggtttagcaaagtctatcggtgtttcaaacttcaacagaagacaattggaaatgatcttgaataagccaggtttgaagtacaaaccagtttgtaaccaagttgaatgtcatccatacttaaaccaatctaaattgttagatttttgtaagtcaaaggatattgctttggttgcatattctgctttaggtactcaaagacatgaattgtgggttgatccaaattcaccagttttgttagaagatccagttttgtgtgctttggctaagaaacataaaagaacaccagcattgattgctttaagataccaattgcaaagaggtgttgttgttttagctaaatcttacaatgaacaaagaattagagaaaacatccaagttttcgaatttcaattgacttcagaagatatgaaagttttggatggtttgaacagaaactatagatacatcgttatggatttcttgatggatcatccagattatccattttcagatgaatactaa

SEQ ID NO: 121 - protein, 322 aa, Sus scrofa
MALNRCVKLNDGHLMPVLGLGTLVSEGVPKSKAGEATRVAIEVGYRHIDAAYVYENEEEVGSALREKIADGTVKREELFYTTKLWATFFRPELVRPALERSLKKLRLDYVDLFIIHVPITMKPGEELLPKDASGKVIFDTVDLRDTWAALEKCKDAGLTKSIGVSNFNHKQLEMILNKPGLKYKPVCNQVECHPYLNQSKLLEFCKSKDIVLVAYSALGSQRNSKWVEESNPYLLEDPVLNAIAKKHNRSPAQVALRYQLQRGVVVLAKSFNEQRIKENFQVFDFELPSEDMKTIDGLNQNLRYFKLLFAVDHPYYPYSEEY

SEQ ID NO: 122 - DNA, 969 bp, Sus scrofa
atggctttgaatagatgtgttaaattgaacgatggtcatttgatgccagttttgggtttaggtactttagtttcagaaggtgttccaaaatctaaagctggtgaagcaacaagagttgcaattgaagttggttatagacatatcgatgctgcttatgtttacgaaaatgaagaagaagttggttcagctttgagagaaaagattgcagatggtactgttaagagagaagaattgttttatactacaaaattgtgggctactttctttagaccagaattggttagaccagcattggaaagatcattgaagaaattgagattagattacgttgatttgtttattatccatgttccaattactatgaaaccaggtgaagaattgttaccaaaggatgcttctggtaaagttattttcgatactgttgatttgagagatacatgggctgcattagaaaagtgtaaggatgcaggtttgacaaagtctattggtgtttcaaacttcaaccataagcaattggaaatgatcttgaataagccaggtttgaagtacaaaccagtttgtaaccaagttgaatgtcatccatacttaaaccaatcaaaattgttagaattttgtaaatctaaagatattgttttggttgcttattctgcattaggttcacaaagaaattctaagtgggttgaagaatcaaatccatacttgttagaagatccagttttgaacgctatcgctaagaaacataatagatcaccagctcaagttgcattgagataccaattacaaagaggtgttgttgttttggctaaatcttttaatgaacaaagaattaaagaaaactttcaagtttttgattttgaattaccatctgaagatatgaagactatcgatggtttgaaccaaaatttgagatacttcaaattgttgttcgctgttgatcatccatattacccatattctgaagaatactaa

SEQ ID NO: 123 - protein, 531 aa, Homo sapiens
MAALGCARLRWALRGAGRGLCPHGARAKAAIPAALPSDKATGAPGAGPGVRRRQRSLEEIPRLGQLRFFFQLFVQGYALQLHQLQVLYKAKYGPMWMSYLGPQMHVNLASAPLLEQVMRQEGKYPVRNDMELWKEHRDQHDLTYGPFTTEGHHWYQLRQALNQRLLKPAEAALYTDAFNEVIDDFMTRLDQLRAESASGNQVSDMAQLFYYFALEAICYILFEKRIGCLQRSIPEDTVTFVRSIGLMFQNSLYATFLPKWTRPVLPFWKRYLDGWNAIFSFGKKLIDEKLEDMEAQLQAAGPDGIQVSGYLHFLLASGQLSPREAMGSLPELLMAGVDTTSNTLTWALYHLSKDPEIQEALHEEVVGVVPAGQVPQHKDFAHMPLLKAVLKETLRLYPVVPTNSRIIEKEIEVDGFLFPKNTQFVFCHYVVSRDPTAFSEPESFQPHRWLRNSQPATPRIQHPFGSVPFGYGVRACLGRRIAELEMQLLLARLIQKYKVVLAPETGELKSVARIVLVPNKKVGLQFLQRQC

SEQ ID NO: 124 - DNA, 1596 bp, Homo sapiens
atggctgcattgggttgtgctagattaagatgggcattgagaggtgctggtagaggtttgtgtccacatggtgctagagcaaaagctgcaattccagctgcattaccatctgataaagctactggtgcaccaggtgctggtccaggtgttagaagaagacaaagatcattggaagaaatcccaagattgggtcaattgagatttttctttcaattgttcgttcaaggttacgcattgcaattgcatcaattgcaagttttgtacaaggctaagtacggtccaatgtggatgtcttacttaggtccacaaatgcatgttaatttggcttcagcaccattgttagaacaagttatgagacaagagggtaaatacccagttagaaacgatatggaattgtggaaagaacatagagatcaacatgatttgacatatggtccttttactacagaaggtcatcattggtaccaattgagacaagctttgaaccaaagattgttaaaaccagcagaagctgcattgtacactgatgcttttaatgaagttattgatgattttatgacaagattagatcaattgagagcagaatctgcttcaggtaatcaagtttctgatatggctcaattgttttattacttcgcattggaagctatctgttacatcttgttcgaaaagagaattggttgtttgcaaagatcaattccagaagatactgttacattcgttagatctatcggtttgatgttccaaaactcattgtatgctacatttttgccaaaatggacaagaccagttttaccattttggaaaagatacttggatggttggaacgcaattttctctttcggtaaaaagttgatcgatgaaaagttggaagatatggaagctcaattacaagctgcaggtccagatggtattcaagtttctggttatttgcatttcttgttagcatctggtcaattgtcaccaagagaagctatgggttcattaccagaattgttaatggcaggtgttgatactacatctaatactttgacatgggctttgtaccatttgtcaaaagatccagaaattcaagaagcattacatgaagaagttgttggtgttgttccagctggtcaagttccacaacataaggatttcgcacatatgccattgttgaaggctgttttgaaggaaactttgagattgtacccagttgttccaacaaactctagaatcatcgaaaaggaaatcgaagttgatggtttcttgttccctaaaaatactcaattcgttttctgtcattacgttgtttcaagagatccaacagcattttctgaaccagaatcatttcaaccacatagatggttgagaaattctcaaccagctactccaagaattcaacatccatttggttcagttccatttggttatggtgttagagcatgtttaggtagaagaatcgctgaattggaaatgcaattgttgttggctagattgatccaaaagtacaaggttgttttggcaccagaaacaggcgaattgaagtctgttgctagaatcgttttagttccaaataagaaagttggtttacaattcttgcaaagacaatgttaa

SEQ ID NO: 125 - protein, 533 aa, Rattus norvegicus
MAVLSRMRLRWALLDTRVMGHGLCPQGARAKAAIPAALRDHESTEGPGTGQDRPRLRSLAELPGPGTLRFLFQLFLRGYVLHLHELQALNKAKYGPMWTTTFGTRTNVNLASAPLLEQVMRQEGKYPIRDSMEQWKEHRDHKGLSYGIFITQGQQWYHLRHSLNQRMLKPAEAALYTDALNEVISDFIARLDQVRTESASGDQVPDVAHLLYHLALEAICYILFEKRVGCLEPSIPEDTATFIRSVGLMFKNSVYVTFLPKWSRPLLPFWKRYMNNWDNIFSFGEKMIHQKVQEIEAQLQAAGPDGVQVSGYLHFLLTKELLSPQETVGTFPELILAGVDTTSNTLTWALYHLSKNPEIQEALHKEVTGVVPFGKVPQNKDFAHMPLLKAVIKETLRLYPVVPTNSRIITEKETEINGFLFPKNTQFVLCHYVVSRDPSVFPEPESFQPHRWLRKREDDNSGIQHPFGSVPFGYGVRSCLGRRIAELEMQLLLSRLIQKYEVVLSPGMGEVKSVSRIVLVPSKKVSLRFLQRQ

SEQ ID NO: 126 - DNA, 1599 bp, Rattus norvegicus
atggctgttttgtctagaatgagattaagatgggcattgttagatacaagagttatgggtcatggtttgtgtccacaaggtgctagagcaaaagctgcaattccagctgcattaagagatcatgaatctacagaaggtccaggtactggtcaagatagaccaagattaagatcattggctgaattaccaggtccaggtactttgagatttttattccaattatttttgagaggttatgttttgcatttgcatgaattgcaagctttgaataaggcaaagtacggtccaatgtggactacaactttcggtacaagaactaacgttaatttggcttcagcaccattgttagaacaagttatgagacaagagggtaaatacccaatcagagattctatggaacaatggaaggaacatagagatcataagggtttatcatacggtattttcattacacaaggtcaacaatggtaccatttgagacattctttgaaccaaagaatgttgaaaccagctgaagctgcattgtacacagatgcattgaacgaagttatttcagatttcattgctagattagatcaagttagaactgaatctgcttcaggtgaccaagttccagatgttgcacatttgttatatcatttggctttggaagcaatctgttacatcttgttcgaaaagagagttggttgtttggaaccatctattccagaagatacagcaacttttattagatccgttggtttgatgttcaagaactcagtttacgttacatttttgccaaagtggtctagaccattgttgccattctggaagagatacatgaacaactgggataacattttctctttcggtgaaaagatgatccatcaaaaggttcaagaaatcgaagctcaattgcaagctgcaggtccagatggtgttcaagtttctggttatttgcatttcttgttgacaaaggaattgttgtcaccacaagaaacagttggtactttcccagaattgatcttggctggtgttgatacaacttctaatacattgacttgggcattgtaccatttgtctaaaaatccagaaatccaagaagctttgcataaggaagttactggtgttgttccattcggtaaagttccacaaaataaggattttgctcatatgccattgttgaaggcagttattaaagaaacattaagattgtatccagttgttccaactaattctagaatcatcacagaaaaggaaactgaaattaatggtttcttgtttcctaaaaatacacaattcgttttgtgtcattacgttgtttctagagatccatcagtttttccagaaccagaatcttttcaaccacatagatggttgagaaagagagaagatgataactctggtattcaacatccatttggttcagttccatttggttatggtgttagatcatgtttgggtagaagaatcgctgaattggaaatgcaattgttgttgtctagattgatccaaaagtacgaagttgttttgtcacctggtatgggtgaggttaagtctgtttcaagaatcgttttagttccatctaagaaagtttctttgagatttttacaaagacaa

SEQ ID NO: 127 - protein, 535 aa, Oryctolagus cuniculus
MAALGCARLRWALLGPRVAGCGLCPQGARAKAAIPTALPADEAAQAPGAGPGDRRRRRSLEELPRLGQLRFFYQAFVQGYLLHLHKLQVLNKARYGPMWVSYLGPQLFVNLASAPLVETVMRQEGKYPVRNDMQLWKEHRDHQDLAYGVFTTDGHDWYQLRQALNQRLLKPAEAALYTDALNEVIDSFVVRLDQLRAESASGDQVPDMADLLYHFALEAICYILFEKRIGCLEASIPKDTENFIRSVGLMFQNSVYVTFLPKWTRPLLPFWKRYLDGWDTIFSFGKNLIDQKLQEVVAQLQSAGSDGVQVSGYLHSLLTSGQLSPREALGSLPELLLAGVDTTSNTLTWALYHLSKNPEIQAALRKEVVGVVAAGQVPQHKDFAHMPLLKAVLKETLRLYPVIPANSRIIVDKEIEVGGFLFPKNTQFVFCHYVTSRDPSTFSEPDTFWPYRWLRKGQPETSKTQHPFGSVPFGYGVRACLGRRIAELEMQLLLARLIQRYELMLAPETGEVQSVARIVLVPNKKVGLRFLPTQR

SEQ ID NO: 128 - DNA, 1608 bp, Oryctolagus cuniculus
atggctgcattgggttgtgctagattaagatgggcattgttaggtccaagagttgctggttgtggtttgtgtccacaaggtgctagagcaaaagctgcaattccaacagctttaccagcagatgaagctgcacaagctccaggtgcaggtccaggtgacagaagaagaagaagatctttggaagaattgccaagattgggtcaattgagatttttctatcaagctttcgttcaaggttacttgttgcatttgcataagttgcaagttttgaataaggcaagatatggtccaatgtgggtttcatacttaggtccacaattgttcgttaatttggcttctgcaccattggttgaaacagttatgagacaagagggtaaatacccagttagaaacgatatgcaattgtggaaagaacatagagatcatcaagatttggcttatggtgtttttactacagatggtcatgattggtaccaattgagacaagcattgaaccaaagattgttgaagccagctgaagctgcattgtacactgatgcattgaacgaagttattgattcattcgttgttagattagatcaattgagagctgaatctgcatcaggtgaccaagttccagatatggctgatttgttgtaccatttcgctttggaagcaatctgttacatcttgttcgaaaagagaattggttgtttagaagcttctatcccaaaggatactgaaaacttcattagatcagttggtttgatgttccaaaactctgtttacgttacatttttgccaaagtggacaagaccattgttaccattttggaaaagatacttggatggttgggatacaattttctctttcggtaaaaatttgatcgatcaaaagttgcaagaagttgttgctcaattacaatctgcaggttcagatggtgttcaagtttcaggttatttgcattctttgttgacttcaggtcaattatctccaagagaagctttaggttctttgccagaattgttattggcaggtgttgatactacatcaaatactttgacatgggctttgtaccatttgtctaaaaatccagaaattcaagctgcattaagaaaagaagttgttggtgttgttgctgcaggtcaagttccacaacataaggatttcgctcatatgccattgttgaaggcagttttgaaggaaacattgagattgtacccagttattccagctaactcaagaatcatcgttgataaggaaattgaagttggtggtttcttgtttcctaaaaatactcaattcgttttctgtcattatgttacttctagagatccatctacattttcagaaccagatactttttggccatacagatggttgagaaaaggtcaaccagaaacttcaaaaacacaacatccatttggttctgttccatttggttatggtgttagagcttgtttgggtagaagaatcgcagaattggaaatgcaattgttgttggctagattgatccaaagatacgaattgatgttagctccagaaacaggtgaagttcaatctgttgcaagaatcgttttagttccaaataagaaagttggtttaagatttttgccaactcaaagataa

SEQ ID NO: 129 - protein, 533 aa, Mus musculus
MAAWSRTRLRWTLLDPRVVGRGLCPQGARAKATIPAALQAQESTEGPGTGQDRPRLRSPAELPGTGTLQFLFQLFLQGYVLHLPDLQVLNKTKYGPMWTTSFGTYTNVNLASAPLLEQVMRQEGKYPIRDHMDQWKDHRDHKGLTYGIFIAQGEQWYHLRQALKQRLLKPDEAALYTDALNEVISDFITRLDQVRAESESGDQVPDMAHLLYHLALEAITYILFEKRIGCLKPSIPEDTAAFIRSVAIMFQNSVYITFLPKWTRPLLPFWKRYLNGWDNIFSFGKKLIDEKVQELKAQLQETGPDGVRVSGYLHFLLTNELLSTQETIGTFPELLLAGVDTTSNTLTWALYHLSKSPEIQEALHKEVTGVVPFGKVPQHKDFAHMPLLKAVIKETLRLYPVVPTNSRIITEKETEINGFLFPKNTQFVLCHYVVSRDPSVFPEPNSFQPHRWLRKKEADNPGILHPFGSVPFGYGVRSCLGRRIAELEMQLMLSRLVQKYEIALAPGMGEVKTVSRIVLVPSKKVRLHFLQRQ

SEQ ID NO: 130 - DNA, 1602 bp, Mus musculus
atggctgcatggtctagaacaagattaagatggactttgttagatccaagagttgttggtagaggtttgtgtccacaaggtgctagagcaaaagctacaattccagctgcattacaagcacaagaatctacagaaggtccaggtactggtcaagatagaccaagattaagatcaccagctgaattgccaggtactggtacattgcaattcttgttccaattatttttgcaaggttatgttttacatttgccagatttgcaagttttgaataagacaaagtacggtccaatgtggactacatctttcggtacttacacaaacgttaatttggcatcagctccattgttagaacaagttatgagacaagagggtaaatacccaattagagatcatatggatcaatggaaagatcatagagatcataagggtttgacttacggtattttcattgcacaaggtgaacaatggtaccatttgagacaagctttgaagcaaagattgttgaagccagatgaagctgcattgtacacagatgctttgaacgaagttatttctgatttcatcactagattggatcaagttagagcagaatctgaatcaggtgaccaagttccagatatggctcatttgttatatcatttggcattggaagctatcacatacatcttgttcgaaaagagaattggttgtttgaaaccatctattccagaagatactgctgcttttattagatctgttgcaatcatgttccaaaactcagtttacatcacatttttaccaaaatggactagaccattgttgccattctggaagagatacttaaacggttgggataacattttctctttcggtaaaaagttgattgatgaaaaagttcaagaattgaaggctcaattgcaagaaacaggtccagatggtgttagagtttctggttatttgcatttcttgttgactaacgaattgttgtcaactcaagaaacaatcggtactttcccagaattgttgttggcaggtgttgatactacatctaacactttgacatgggctttgtaccatttgtctaagtcaccagaaatccaagaagctttgcataaggaagttacaggtgttgttccattcggtaaagttccacaacataaggatttcgcacatatgccattgttgaaggctgttattaaagaaacattaagattgtatccagttgttccaactaattctagaatcatcacagaaaaggaaactgaaattaatggtttcttgttccctaaaaatactcaattcgttttgtgtcattacgttgtttctagagatccatcagtttttccagaaccaaattcatttcaaccacatagatggttaagaaagaaagaagcagataatccaggtattttgcatccatttggttctgttccatttggttatggtgttagatcatgtttaggtagaagaatcgctgaattggaaatgcaattgatgttgtcaagattagttcaaaagtacgaaatcgcattggctcctggtatgggtgaagttaagactgtttctagaatcgttttagttccatctaagaaagttagattgcatttcttgcaaagacaataa

SEQ ID NO: 131 - protein, 534 aa, Bos taurus
MGALGSARLRWALLGRRAALPGLGSFGARAKAAIPSALPAAQAAEAPGTGPGDRRLRSLDELSGPGQLRLLFQLLVQGYVLHLHQLQVLNKAKYGPIWINRVGPQMHVHLASAPLLEQVMRQEGKYPVRDDMKLWKEHRDQQGLSYGPFTTMGEQWYRLRQTLNQRMLKPAEAALYTDALNEVINDFMDQLKQLRAESASGDHVPDIAHQFYFFALEAISYILFEKRIGCLERSIPKDTETFVRSVGLMFHNSLFVTFLPTWTRPLLPFWKRYLDGWNTIFSFGKKLIDQKLEEIEAQLKTENPEKTQISGYLHFLLTSGQLSPREAEGSLPELLLAGVDTTSNTLTWALYHLSKNPEIQAALHKEVVGVVPAGQVPQHKDLARMPLLKAVLKETLRLYPVVPVNSRVVVDKEIEVGGFLFPKNTQFVLCHYVISRDPDIYPEPDSFQPQRWLRKNQPDALKTQHPFGSVPFGYGVRACLGRRIAELEMQLLLTRLIQHYEVVLAPETGEVTSVARIVLVPNKKVGLRFLQRQS

SEQ ID NO: 132 - DNA, 1605 bp, Bos taurus
atgggtgctttaggttctgcaagattgagatgggctttgttaggtagaagagctgcattgccaggtttaggttcttttggtgctagagcaaaagctgcaattccatcagctttgccagctgcacaagctgcagaagcaccaggtactggtccaggtgacagaagattgagatctttagatgaattgtcaggtccaggtcaattgagattgttgttccaattgttagttcaaggttacgttttgcatttgcatcaattgcaagttttgaataaggctaagtacggtccaatttggattaatagagttggtccacaaatgcatgttcatttggcttctgcaccattgttagaacaagttatgagacaagagggtaaatacccagttagagatgatatgaagttgtggaaagaacatagagatcaacaaggtttatcatatggtccttttactactatgggtgaacaatggtacagattgagacaaactttgaaccaaagaatgttaaaaccagctgaagctgcattatatacagatgcattgaatgaagttattaatgatttcatggatcaattgaaacaattgagagctgaatctgcatcaggtgaccatgttccagatatcgctcatcaattctatttctttgctttggaagcaatctcttacattttgtttgaaaagagaattggttgtttggaaagatcaatcccaaaggatactgaaacattcgttagatctgttggtttaatgttccataactcattgttcgttacatttttgccaacttggacaagaccattgttgccattctggaagagatatttggatggttggaacacaattttctctttcggtaaaaagttgatcgatcaaaagttggaagaaatcgaagctcaattgaagactgaaaacccagaaaagactcaaatctctggttacttacatttcttgttgacatctggtcaattgtcaccaagagaagctgaaggttcattaccagaattgttattggcaggtgttgatactacatctaacactttgacatgggctttgtaccatttgtctaaaaatccagaaattcaagctgcattacataaagaagttgttggtgttgttccagcaggtcaagttccacaacataaagatttggctagaatgccattgttgaaggcagttttgaaggaaactttgagattatacccagttgttccagttaactctagagttgttgttgataaggaaatcgaagttggtggtttcttgtttcctaaaaatacacaattcgttttgtgtcattacgttatctctagagatccagatatctatccagaaccagattcatttcaaccacaaagatggttaagaaagaatcaaccagatgctttgaaaactcaacatccatttggttcagttccatttggttatggtgttagagcttgtttaggtagaagaatcgcagaattggaaatgcaattgttgttgacaagattgatccaacattacgaagttgttttggctccagaaactggtgaagttacatctgttgcaagaatcgttttggttccaaataagaaagttggtttaagatttttgcaaagacaatcataa

SEQ ID NO: 133 - protein, 522 aa, Danio rerio
MAVSFALSSAERLGWCFLRPTTAATGFRRAAGNSAAASVSVQDGHRKLKTEADLPEIKIFTMLYQMLFKGYLNSVHELQLYQKQVYGPLWKINAGNLQGISITSVELLEELLRKDEKYPCRGYMTLWTEHRDLRGISYGPFTEEGEKWYKLRAVLNKRMLHPKDSLQYGDVVNAVITDFIKRIYYLREMSPTGDLVSNLTNELYRFSLEGIASILFETRIGCLEKEIPAETQEFINSIAQMFTYNMHVALLPNWTRNYLPFWQKYIDGWDGIFKFGTKMINLKMEAIQTRLDTNQEVAGEYLTYLLSSGKMSCKDVYGSVSEVLLAGVDTTSNTMLWALYLLSKDPAAQETLHQEVTKVLKGDRIPTAEEVNSMPFLKAVIKETLRLYPVVPVNSRLIAESEVIIGEYLFPKKTTFNLFHYAISHDEKVFPEPQKFKPERWLRDGRTRPNPFGSIPFGFGVRACVGRRIAELEMHLALARLIKLFEMRPDPTVGEVKANFRSVLVPNKKVNLHFVERQKTET

SEQ ID NO: 134 - DNA, 1569 bp, Danio rerio
atggcagtttcttttgctttatcttcagcagaaagattaggttggtgtttcttaagaccaactacagctgcaacaggttttagaagagctgctggtaattcagctgcagcttctgtttcagttcaagatggtcatagaaagttgaagactgaagcagatttgccagaaattaaaatttttacaatgttgtaccaaatgttgtttaaaggttacttgaactctgttcatgaattgcaattgtaccaaaagcaagtttacggtccattatggaagattaatgctggtaatttgcaaggtatctctatcacttcagttgaattgttggaagaattgttgagaaaggatgaaaagtacccatgtagaggttacatgactttatggacagaacatagagatttgagaggtatttcttatggtccttttactgaagaaggtgaaaagtggtacaagttgagagcagttttgaataagagaatgttgcatccaaaggattcattgcaatatggtgacgttgttaatgctgttattactgatttcatcaagagaatctattacttaagagaaatgtctccaactggtgacttggtttctaatttgacaaacgaattgtacagattttctttggaaggtatcgcttcaatcttgttcgaaacaagaatcggttgtttagaaaaagaaattccagctgaaactcaagaattcattaactctatcgcacaaatgttcacatacaacatgcatgttgctttgttgccaaactggactagaaactatttgccattctggcaaaagtacattgatggttgggatggtatttttaagttcggtacaaagatgatcaatttgaaaatggaagcaatccaaactagattggatacaaaccaagaagttgctggtgaatatttgacttacttgttgtcttcaggtaaaatgtcttgtaaggatgtttacggttctgtttcagaagttttgttagcaggtgttgatactacatctaatactatgttgtgggctttatacttgttatcaaaagatccagcagctcaagaaactttgcatcaagaagttacaaaggttttgaaaggtgacagaattccaacagcagaagaagttaattcaatgccatttttaaaggctgttattaaagaaactttgagattatatccagttgttccagttaattctagattgatcgcagaatcagaagttattatcggtgaatatttgtttccaaagaaaactacttttaatttgttccattacgctatctctcatgatgaaaaggttttcccagaaccacaaaagtttaaaccagaaagatggttaagagatggtagaacaagaccaaatccatttggttcaattccatttggttttggtgttagagcttgtgttggtagaagaattgcagaattggaaatgcatttggcattggctagattgattaaattgttcgaaatgaggccagatccaactgttggtgaagttaaagctaacttcagatctgttttagttccaaataagaaagttaatttgcattttgttgaaagacaaaagactgaaacataa

SEQ ID NO: 135 - protein, 531 aa, Macaca fascicularis
MAALGCARLRWVLRGAGRGLCPHGARAKATIPTALPSDKATEAPGAGPGIRRRQRSLKEIPRLGQLRFFFQLFVQGYALQLHQLQVLYKAKYGPMWMSYLGPQMHVNLASAPLLEQVMRQEGKYPVRNDMELWKEHRDLHDLTYGPFTTEGHHWYQLRQALNQRLLKPAEAALYTDAFNEVIDDFMIRLDQLRAESASGNQVSDTAQLFYYFALEAICYILFEKRIGCLQRSIPEDTVTFVRSIGLMFQNSLYATFLPKWTRPVLPFWKRYLDGWNAIFSFGKKLIDEKLEDMEAQLQAEGPDGVQVSGYLHFLLASGQLSPREAMGSLPELLMAGVDTTSNTLTWALYHLSKDPEIQEALHEEVVGVVPAGQVPQHKDFAHLPLLKAVLKETLRLYPVVPTNSRIIEKEIEVDGFLFPKNTQFVFCHYVVSRDPTTFSEPESFQPHRWLRNSQPATPRIQHPFGSVPFGYGVRACLGRRIAELEMQLLLARLIQKYKVVLAPETGELKSVARIVLVPNKKVGLQFLQRQC

SEQ ID NO: 136 - DNA, 1596 bp, Macaca fascicularis
atggctgcattgggttgtgctagattaagatgggttttgagaggtgcaggtagaggtttgtgtccacatggtgctagagcaaaagctactattccaacagctttaccatctgataaagcaactgaagctccaggtgcaggtccaggtattagaagaagacaaagatcattgaaggaaatcccaagattgggtcaattgagatttttctttcaattgttcgttcaaggttacgctttgcaattgcatcaattgcaagttttgtacaaggcaaagtacggtccaatgtggatgtcttacttaggtccacaaatgcatgttaatttggcatcagctccattgttagaacaagttatgagacaagagggtaaatacccagttagaaacgatatggaattgtggaaagaacatagagatttgcatgatttgacatatggtccttttactacagaaggtcatcattggtaccaattgagacaagctttgaaccaaagattgttaaaaccagctgaagctgcattatatactgatgcttttaatgaagttattgatgatttcatgattagattagatcaattgagagctgaatctgcatcaggtaatcaagtttctgatacagctcaattgttttattacttcgctttggaagcaatctgttacatcttgttcgaaaagagaattggttgtttgcaaagatcaattccagaagatactgttacattcgttagatctatcggtttgatgttccaaaactcattgtatgctacatttttgccaaaatggacaagaccagttttaccattttggaaaagatacttggatggttggaacgcaattttctctttcggtaaaaagttgatcgatgaaaagttggaagatatggaagctcaattacaagcagaaggtccagatggtgttcaagtttctggttatttgcatttcttgttagcttctggtcaattgtcaccaagagaagcaatgggttcattaccagaattgttaatggctggtgttgatactacatctaatactttgacatgggcattgtaccatttgtcaaaagatccagaaattcaagaagctttacatgaagaagttgttggtgttgttccagcaggtcaagttccacaacataaggatttcgctcatttgccattgttgaaggcagttttgaaggaaactttgagattgtacccagttgttccaacaaactctagaatcatcgaaaaggaaatcgaagttgatggtttcttgttccctaaaaatactcaattcgttttctgtcattacgttgtttcaagagatccaactacattttctgaaccagaatcatttcaaccacatagatggttaagaaattctcaaccagctacaccaagaattcaacatccatttggttcagttccatttggttatggtgttagagcttgtttaggtagaagaatcgcagaattggaaatgcaattgttgttggctagattgatccaaaagtacaaggttgttttggctccagaaactggtgaattgaagtctgttgcaagaatcgttttagttccaaataagaaagttggtttacaattcttgcaaagacaatgttaa

SEQ ID NO: 137 - protein, 542 aa, Xenopus laevis
MSRGGLLLKTCRVAVSQGRAVTGGPPASRLHCVPQGSGYLQAGRGVSVSQGRAVTGAAVETADGRKEMKEFDDLPGPSLLKNLYYYFVRGYLLHTHELQLNYKKMYGPLWRSEIGKYKMVNIGDPEALQQLLRQEGKYPMRNKEDIWKAHRDQRKLAYGPFTEEGYHWYRIRSVLNKKMLKPSEASSYAGGINEVVTDFMNKLQYMRKASPSGDMVNDVANALYRFAFEGISNILFETRIGCLEKQTPPETQKFIDSIGYMFKNSVYVTFLPQWTKGILPYWDRYIEGWDNIFDFGKQLVDKKMSEIQSRLDRGEEVEGEYLTYLLSSANLNIGEVYGSVCELLLAGVDTTSNTLCWSMYHLARDPELQQAVYEEVSSAVPMDRIPVAEDISKMPLLRGVIKETLRLYPVVPTNGRIVSEKDVKIGEYRFPKNTLFVLCHFAIARDEENFEDPLKFQPQRWLRDGGMKHHPFSSIPFGYGVRACVGKRIAQLEMHLALSRIIRIFELRPDPKGGDIKTIARILLTPNKPVNLQFLERNAHQG

SEQ ID NO: 138 - DNA, 1629 bp, Xenopus laevis
atgtctagaggtggtttgttattgaaaacttgtagagttgctgtttcacaaggtagagcagttacaggtggtccaccagcttctagattgcattgtgttccacaaggttcaggttatttgcaagcaggtagaggtgtttctgtttcacagggcagagcagttactggtgctgcagttgaaacagcagatggtagaaaggaaatgaaggaattcgatgatttgccaggtccatctttgttgaaaaatttgtactactacttcgttagaggttacttattgcatactcatgaattgcaattgaactacaagaaaatgtacggtccattgtggagatcagaaatcggtaaatacaagatggttaacattggtgacccagaagctttgcaacaattgttgagacaagagggtaaatacccaatgagaaataaggaagatatttggaaagcacatagagatcaaagaaaattggcttatggtccttttactgaagaaggttaccattggtacagaattagatctgttttgaataagaaaatgttgaagccatcagaagcttcttcatacgcaggtggtattaatgaagttgttacagatttcatgaataagttgcaatacatgagaaaggcttctccatcaggtgacatggttaacgatgttgctaacgcattgtacagatttgcatttgaaggtatctctaacatcttgttcgaaacaagaattggttgtttagaaaaacaaactccaccagaaacacaaaagtttattgattctattggttacatgttcaagaactcagtttacgttacatttttgccacaatggacaaaaggtattttaccatactgggatagatacatcgaaggttgggataacatcttcgatttcggtaaacaattggttgataagaaaatgtctgaaatccaatcaagattagatagaggtgaagaagttgagggtgaatacttgacttatttgttgtcttcagctaatttgaacatcggtgaagtttacggttctgtttgtgaattgttgttagcaggtgttgatactacatctaacacattgtgttggtcaatgtaccatttggcaagagatccagaattgcaacaagctgtttacgaagaagtttcttcagcagttccaatggatagaattccagttgctgaagatatctctaagatgccattgttgagaggtgttattaaagaaactttgagattgtacccagttgttccaacaaacggtagaatcgtttcagaaaaggatgttaaaattggtgaatatagatttcctaaaaatactttgttcgttttgtgtcatttcgctatcgcaagagatgaagaaaacttcgaagatccattgaagtttcaaccacaaagatggttaagagatggtggtatgaagcatcatccattttcttcaatcccattcggttatggtgttagagcttgtgttggtaaaagaatcgcacaattggaaatgcatttggctttgtctagaatcatcagaatcttcgaattaagaccagatccaaaaggtggtgacatcaagactatcgctagaattttgttgacaccaaataagccagttaatttgcaattcttggaaagaaatgctcatcaaggttaa

SEQ ID NO: 139 - protein, 690 aa, Homo sapiens
MGVRQQLALLLLLLLLLWGLGQPVWPVAVALTLRWLLGDPTCCVLLGLAMLARPWLGPWVPHGLSLAAAALALTLLPARLPPGLRWLPADVIFLAKILHLGLKIRGCLSRQPPDTFVDAFERRARAQPGRALLVWTGPGAGSVTFGELDARACQAAWALKAELGDPASLCAGEPTALLVLASQAVPALCMWLGLAKLGCPTAWINPHGRGMPLAHSVLSSGARVLVVDPDLRESLEEILPKLQAENIRCFYLSHTSPTPGVGALGAALDAAPSHPVPADLRAGITWRSPALFIYTSGTTGLPKPAILTHERVLQMSKMLSLSGATADDVVYTVLPLYHVMGLVVGILGCLDLGATCVLAPKFSTSCFWDDCRQHGVTVILYVGELLRYLCNIPQQPEDRTHTVRLAMGNGLRADVWETFQQRFGPIRIWEVYGSTEGNMGLVNYVGRCGALGKMSCLLRMLSPFELVQFDMEAAEPVRDNQGFCIPVGLGEPGLLLTKVVSQQPFVGYRGPRELSERKLVRNVRQSGDVYYNTGDVLAMDREGFLYFRDRLGDTFRWKGENVSTHEVEGVLSQVDFLQQVNVYGVCVPGCEGKVGMAAVQLAPGQTFDGEKLYQHVRAWLPAYATPHFIRIQDAMEVTSTFKLMKTRLVREGFNVGIVVDPLFVLDNRAQSFRPLTAEMYQAVCEGTWRL

SEQ ID NO: 140 - DNA, 2073 bp, Homo sapiens
atgggtgttagacaacaattggctttgttattattgttgttgttgttgttgtggggtttaggtcaaccagtttggccagttgctgttgcattgactttaagatggttattgggtgacccaacatgttgtgttttattgggtttagctatgttggcaagaccatggttaggtccatgggttccacatggtttgtctttagctgcagctgcattggcattaactttattgccagctagattgccaccaggtttaagatggttgccagcagatgttattttcttggctaagatcttgcatttgggtttgaagatcagaggttgtttgtctagacaaccaccagatacatttgttgatgcttttgaaagaagagctagagcacaaccaggtagagcattattggtttggactggtccaggtgctggttcagttacatttggtgaattagatgctagagcatgtcaagctgcatgggctttaaaagcagaattgggtgacccagcatctttgtgtgctggtgaaccaactgctttattggttttggcttcacaagcagttccagctttatgtatgtggttaggtttggcaaaattgggttgtccaacagcttggattaatccacatggtcgtggtatgccattagcacattctgttttgtcttcaggtgctagagttttagttgttgatccagatttgagagaatcattggaagaaatcttgccaaagttgcaagctgaaaacatcagatgtttctatttgtctcatacttcaccaacaccaggtgttggtgctttaggtgctgcattggatgctgcaccatctcatccagttccagcagatttgagagctggtattacttggagatctccagcattgtttatatatacatcaggtactacaggtttaccaaaaccagctatcttgactcatgaaagagttttgcaaatgtcaaagatgttgtctttgtcaggtgctactgcagatgatgttgtttacacagttttgccattgtaccatgttatgggtttagttgttggtattttgggttgtttagatttgggtgcaacttgtgttttggctccaaaattttctacatcatgtttctgggatgattgtagacaacatggtgttacagttattttgtacgttggtgaattgttgagatacttatgtaacattccacaacaaccagaagatagaactcatacagttagattggcaatgggtaatggtttaagagctgatgtttgggaaactttccaacaaagattcggtccaatcagaatttgggaagtttatggttctacagaaggtaatatgggtttggttaattacgttggtagatgtggtgctttgggtaaaatgtcttgtttgttgagaatgttgtcaccattcgaattggttcaattcgatatggaagctgcagaaccagttagagataatcaaggtttttgtattccagttggtttaggtgaaccaggtttattgttgactaaggttgtttctcaacaaccattcgttggttatagaggtccaagagaattgtctgaaagaaaattggttagaaacgttagacaatcaggtgacgtttattacaatacaggtgacgttttggctatggatagagaaggtttcttgtacttcagagatagattgggtgacacttttagatggaaaggtgaaaatgtttctacacatgaagttgaaggtgttttgtcacaagttgatttcttgcaacaagttaacgtttacggtgtttgtgttccaggttgtgagggtaaagttggtatggctgcagttcaattggcaccaggtcaaactttcgatggtgaaaagttgtaccaacatgttagagcttggttaccagcttacgcaacaccacatttcatcagaattcaagatgcaatggaagttacttctacttttaaattgatgaagactagattggttagagaaggttttaatgttggtatcgttgttgatccattgttcgttttggataacagagctcaatcttttagaccattgactgcagaaatgtaccaagctgtttgtgaaggtacatggagattgtaa

SEQ ID NO: 141 - protein, 690 aa, Rattus norvegicus
MGVWKKLTFLLLSLLLLVGLGQPLWPAATALALRWFLGDPTCFVLLGLAFLGRPWISSWIPHWLSLAAAALTLSLLPPRPPPELRWLHKDVAFAFKLLFYGLNLRRRLNRHPPELFVDALEQQAQARPDQVALVCTGSEGCSITNRELNAKACQAAWALKAKLKEATIQEDKGATAILVLPSKSISALSVFLGLAKLGCPVAWINPHSRGMPLLHSVQSSGASVLIVDPDLQENLEEVLPKLLAENIRCFYLGHSSPTPGVEALGAALDAAPSDPVPAKLRANIKWKSPAIFIYTSGTTGLPKPAILSHERVIQMSNVLSFCGRTADDVVYNVLPLYHSMGLVLGVLGCLQLGATCVLAPKFSASRYWAECRQYSVTVVLYVGEVLRYLCNVPGQPEDKKHTVRFALGNGLRADVWENFQQRFGPIQIWELYGSTEGNVGLMNYVGHCGAVGKTSCFIRMLTPLELVQFDIETAEPVRDKQGFCIPVETGKPGLLLTKIRKNQPFLGYRGSQDETKRKLVANVRQVGDLYYNTGDVLALDQEGFFYFRDRLGDTFRWKGENVSTREVEGVLSILDFLEEVNVYGVTVPGCEGKVGMAAVKLAPGKTFDGQKLYQHVRSWLPAYATPHFIRIQDSLEITNTYKLVKSQLAREGFDVGVIADPLYILDNKAETFRSLMPDVYQAVCEGTWKL

SEQ ID NO: 142 - DNA, 2073 bp, Rattus norvegicus
atgggtgtttggaagaaattgacatttttgttgttgtctttgttgttattggttggtttaggtcaaccattgtggccagctgcaactgctttggcattaagatggtttttaggtgacccaacatgtttcgttttgttgggtttggcatttttgggtagaccatggatttcttcatggattccacattggttgtcattagctgcagctgcattgacattatctttattgccaccaagaccaccaccagaattgagatggttacataaagatgttgcttttgcttttaaattgttgttttatggtttgaatttgagaagaagattgaacagacatccaccagaattgtttgttgatgcattagaacaacaagctcaagcaagaccagatcaagttgctttggtttgtactggttcagaaggttgttctatcacaaacagagaattgaacgctaaggcatgtcaagctgcatgggctttgaaggcaaagttgaaggaagcaactatccaagaagataaaggtgctacagcaattttggttttgccatctaagtcaatctctgctttgtcagttttcttgggtttagctaaattaggttgtccagttgcatggattaatccacattctcgtggtatgccattattgcattcagttcaatcttcaggtgcttctgttttgattgttgatccagatttgcaagaaaatttggaagaagttttgccaaagttgttggcagaaaacatcagatgtttctatttgggtcattcttcaccaactccaggtgttgaagctttgggtgctgcattagatgctgcaccatcagatccagttcctgctaagttgagagcaaacatcaagtggaagtcaccagcaatttttatctatacttctggtactacaggtttgccaaaaccagctatcttgtcacatgaaagagttattcaaatgtcaaacgttttgtctttctgtggtagaacagctgatgatgttgtttacaacgttttgccattgtaccattctatgggtttggttttaggtgtcttgggttgtttgcaattaggtgctacttgtgttttagcaccaaaattttcagcttctagatattgggcagaatgtagacaatactctgttacagttgttttgtatgttggtgaagttttgagatacttatgtaatgttccaggtcaaccagaagataagaaacatactgttagattcgctttgggtaatggtttaagagcagatgtttgggaaaacttccaacaaagattcggtccaatccaaatttgggaattgtatggttcaacagagggtaacgttggtttaatgaactacgttggtcattgtggtgcagttggtaaaacttcttgtttcatcagaatgttgacaccattggaattagttcaattcgatatcgaaactgctgaaccagttagagataagcaaggtttctgtatcccagttgaaactggtaaaccaggtttattgttgacaaagatcagaaagaatcaaccatttttaggttatagaggttctcaagatgaaactaagagaaaattggttgcaaacgttagacaagttggtgacttgtattacaatacaggtgacgttttggctttggatcaagaaggtttcttttatttcagagatagattgggtgacacttttagatggaaaggtgaaaatgtttcaacaagagaagttgaaggtgttttgtctatcttggatttcttggaagaagttaacgtttacggtgttacagttccaggttgtgagggtaaagttggtatggctgcagttaaattggctccaggtaaaactttcgatggtcaaaagttgtaccaacatgttagatcatggttaccagcttacgcaacaccacatttcatcagaattcaagattcattggaaattactaatacatacaaattggttaagtctcaattggctagagaaggttttgatgttggtgttattgcagatccattgtacatcttggataataaggctgaaacttttagatctttgatgccagatgtttaccaagctgtttgtgaaggtacatggaaattataa

SEQ ID NO: 143 - protein, 669 aa, Saccharomyces cerevisiae
MSPIQVVVFALSRIFLLLFRLIKLIITPIQKSLGYLFGNYFDELDRKYRYKEDWYIIPYFLKSVFCYIIDVRRHRFQNWYLFIKQVQQNGDHLAISYTRPMAEKGEFQLETFTYIETYNIVLRLSHILHFDYNVQAGDYVAIDCTNKPLFVFLWLSLWNIGAIPAFLNYNTKGTPLVHSLKISNITQVFIDPDASNPIRESEEEIKNALPDVKLNYLEEQDLMHELLNSQSPEFLQQDNVRTPLGLTDFKPSMLIYTSGTTGLPKSAIMSWRKSSVGCQVFGHVLHMTNESTVFTAMPLFHSTAALLGACAILSHGGCLALSHKFSASTFWKQVYLTGATHIQYVGEVCRYLLHTPISKYEKMHKVKVAYGNGLRPDIWQDFRKRFNIEVIGEFYAATEAPFATTTFQKGDFGIGACRNYGTIIQWFLSFQQTLVRMDPNDDSVIYRNSKGFCEVAPVGEPGEMLMRIFFPKKPETSFQGYLGNAKETKSKVVRDVFRRGDAWYRCGDLLKADEYGLWYFLDRMGDTFRWKSENVSTTEVEDQLTASNKEQYAQVLVVGIKVPKYEGRAGFAVIKLTDNSLDITAKTKLLNDSLSRLNLPSYAMPLFVKFVDEIKMTDNHKILKKVYREQKLPKGLDGNDTIFWLKNYKRYEVLTAADWEAIDAQTIKL

SEQ ID NO: 144 - DNA, 2010 bp, Saccharomyces cerevisiae
atgtctcccatacaggttgttgtctttgccttgtcaaggattttcctgctattattcagacttatcaagctaattataacccctatccagaaatcactgggttatctatttggtaattattttgatgaattagaccgtaaatatagatacaaggaggattggtatattattccttactttttgaaaagcgtgttttgttatatcattgatgtgagaagacataggtttcaaaactggtacttatttattaaacaggtccaacaaaatggtgaccatttagcgattagttacacccgtcccatggccgaaaagggagaatttcaactcgaaacctttacgtatattgaaacttataacatagtgttgagattgtctcatattttgcattttgattataacgttcaggccggtgactacgtggcaatcgattgtactaataaacctcttttcgtatttttatggctttctttgtggaacattggggctattccagcttttttaaactataatactaaaggcactccgctggttcactccctaaagatttccaatattacgcaggtatttattgaccctgatgccagtaatccgatcagagaatcggaagaagaaatcaaaaacgcacttcctgatgttaaattaaactatcttgaagaacaagacttaatgcatgaacttttaaattcgcaatcaccggaattcttacaacaagacaacgttaggacaccactaggcttgaccgattttaaaccctctatgttaatttatacatctggaaccactggtttgcctaaatccgctattatgtcttggagaaaatcctccgtaggttgtcaagtttttggtcatgttttacatatgactaatgaaagcactgtgttcacagccatgccattgttccattcaactgctgccttattaggtgcgtgcgccattctatctcacggtggttgccttgcgttatcgcataaattttctgccagtacattttggaagcaagtttatttaacaggagccacgcacatccaatatgtcggagaagtctgtagatacctgttacatacgccaatttctaagtatgaaaagatgcataaggtgaaggttgcttatggtaacgggctgagacctgacatctggcaggacttcaggaagaggttcaacatagaagttattggtgaattctatgccgcaactgaagctccttttgctacaactaccttccagaaaggtgactttggaattggcgcatgtaggaactatggtactataattcaatggtttttgtcattccaacaaacattggtaaggatggacccaaatgacgattccgttatatatagaaattccaagggtttctgcgaagtggcccctgttggcgaaccaggagaaatgttaatgagaatctttttccctaaaaaaccagaaacatcttttcaaggttatcttggtaatgccaaggaaacaaagtccaaagttgtgagggatgtcttcagacgtggcgatgcttggtatagatgtggagatttattaaaagcggacgaatatggattatggtatttccttgatagaatgggtgatactttcagatggaaatctgaaaatgtttccactactgaagtagaagatcagttgacggccagtaacaaagaacaatatgcacaagttctagttgttggtattaaagtacctaaatatgaaggtagagctggttttgcagttattaaactaactgacaactctcttgacatcactgcaaagaccaaattattaaatgattccttgagccggttaaatctaccgtcttatgctatgcccctatttgttaaatttgttgatgaaattaaaatgacagataatcataaaattttgaagaaggtttatagagagcaaaaattaccaaagggtttggatggaaatgacactattttttggctcaagaattacaagcgctatgaagtcttgaccgctgctgattgggaagccatcgatgcacaaacaattaaattatga

SEQ ID NO: 145 - protein, 382 aa, Rattus norvegicus
MALRGVRVLELAGLAPGPFCGMILADFGAEVVLVDRLGSVNHPSHLARGKRSLALDLKRSPGAAVLRRMCARADVLLEPFRCGVMEKLQLGPETLRQDNPKLIYARLSGFGQSGIFSKVAGHDINYVALSGVLSKIGRSGENPYPPLNLLADFGGGGLMCTLGILLALFERTRSGLGQVIDANMVEGTAYLSTFLWKTQAMGLWAQPRGQNLLDGGAPFYTTYKTADGEFMAVGAIEPQFYTLLLKGLGLESEELPSQMSIEDWPEMKKKFADVFARKTKAEWCQIFDGTDACVTPVLTLEEALHHQHNRERGSFITDEEQHACPRPAPQLSRTPAVPSAKRDPSVGEHTVEVLKDYGFSQEEIHQLHSDRIIESNKLKANL

SEQ ID NO: 146 - DNA, 1149 bp, Rattus norvegicus
atggctttgagaggtgttagagttttagaattggctggtttggcaccaggtccattttgtggtatgattttagctgattttggtgcagaagttgttttggttgatagattaggttctgttaatcatccatcacatttggctagaggtaaaagatctttagcattggatttgaagagatcaccaggtgctgcagttttaagaagaatgtgtgctagagcagatgttttgttagaaccttttagatgtggtgttatggaaaaattgcaattaggtccagaaacattgagacaagataacccaaagttgatctatgctagattgtctggttttggtcaatctggtattttctctaaggttgctggtcatgatatcaactacgttgcattgtctggtgttttgtcaaagatcggtagatcaggtgaaaatccatacccaccattaaatttgttagcagattttggtggtggtggtttgatgtgtacattgggtattttgttggctttgttcgaaagaactagatctggtttaggtcaagttattgatgctaatatggttgaaggtactgcatatttgtcaacatttttatggaagactcaagctatgggtttgtgggcacaaccaagaggtcaaaatttgttagatggtggtgctccattttatactacatacaaaacagcagatggtgaattcatggctgttggtgcaatcgaaccacaattctacactttgttgttgaagggtttgggtttagaatctgaagaattgccatctcaaatgtcaatcgaagattggccagaaatgaaaaagaaattcgctgatgttttcgcaagaaagacaaaggctgaatggtgtcaaatctttgatggtactgatgcatgtgttactccagttttgacattagaagaagctttgcatcatcaacataacagagaaagaggttcttttattactgatgaagaacaacatgcttgtccaagaccagcaccacaattatcaagaacaccagctgttccatctgcaaaaagagatccatcagttggtgaacatactgttgaagttttgaaggattacggtttttctcaagaagaaatccatcaattgcattctgatagaattattgaatcaaataagttgaaagctaatttgtaa

SEQ ID NO: 147 - protein, 382 aa, Homo sapiens
MALQGISVVELSGLAPGPFCAMVLADFGARVVRVDRPGSRYDVSRLGRGKRSLVLDLKQPRGAAVLRRLCKRSDVLLEPFRRGVMEKLQLGPEILQRENPRLIYARLSGFGQSGSFCRLAGHDINYLALSGVLSKIGRSGENPYAPLNLLADFAGGGLMCALGIIMALFDRTRTGKGQVIDANMVEGTAYLSSFLWKTQKLSLWEAPRGQNMLDGGAPFYTTYRTADGEFMAVGAIEPQFYELLIKGLGLKSDELPNQMSMDDWPEMKKKFADVFAEKTKAEWCQIFDGTDACVTPVLTFEEVVHHDHNKERGSFITSEEQDVSPRPAPLLLNTPAIPSFKRDPFIGEHTEEILEEFGFSREEIYQLNSDKIIESNKVKASL

SEQ ID NO: 148 - DNA, 1149 bp, Homo sapiens
atggcattacaaggtatttctgttgttgaattgtcaggtttagctccaggtccattttgtgctatggttttggcagattttggtgctagagttgttagagttgatagaccaggttctagatatgatgtttcaagattgggtagaggtaaaagatcattagttttggatttgaagcaaccaagaggtgctgcagttttgagaagattgtgtaagagatctgatgttttgttggaaccttttagaagaggtgttatggaaaaattgcaattaggtccagaaatcttgcaaagagaaaacccaagattgatctatgcaagattgtcaggttttggtcaatctggttcattttgtagattggcaggtcatgatatcaactatttggctttgtctggtgttttgtcaaagatcggtagatctggtgaaaatccatacgctccattgaatttgttagctgattttgctggtggtggtttgatgtgtgcattgggtatcatcatggctttgttcgatagaactagaactggtaaaggtcaagttattgatgcaaatatggttgaaggtactgcttatttgtcttcatttttatggaagacacaaaagttgtcattatgggaagctccaagaggtcaaaatatgttagatggtggtgcaccattttatactacatacagaactgctgatggtgaattcatggctgttggtgcaatcgaaccacaattctacgaattgttgattaaaggtttgggtttaaagtcagatgaattgccaaaccaaatgtctatggatgattggccagaaatgaaaaagaaattcgcagatgttttcgctgaaaagactaaagcagaatggtgtcaaatttttgatggtacagatgcttgtgttactccagttttgacattcgaagaagttgttcatcatgatcataataaggaaagaggttcttttattacatcagaagaacaagatgtttcaccaagaccagcaccattgttattgaatactccagctatcccatcttttaaaagagatccttttattggtgaacatacagaagaaatcttggaagaattcggtttttctagagaagaaatctatcaattaaattctgataaaattattgaatcaaataaggttaaagcttctttgtaa

SEQ ID NO: 149 - protein, 381 aa, Mus musculus
MVLRGVRVVELAGLAPGPFCGMVLADFGAEVVRVNRLGSTGENFLARGKRSLALDLKRSQGVTVLRRMCARADVLLEPFRCGVMEKLQLGPETLLQDNPKLIYARLSGFGQSGIFSKVAGHDINYLALSGVLSKIGRSGENPYPPLNLLADFGGGGLMCTLGIVLALFERTRSGRGQVIDSSMVEGTAYLSSFLWKTQPMGLWKQPRGQNILDGGAPFYTTYKTADGEFMAVGAIEPQFYALLLKGLGLESEELPSQMSSADWPEMKKKFADVFAKKTKAEWCQIFDGTDACVTPVLTFEEALHHQHNRERASFITDGEQLPSPRPAPLLSRTPAVPSAKRDPSVGEHTVEVLREYGFSQEEILQLHSDRIVESDKLKANL

SEQ ID NO: 150 - DNA, 1146 bp, Mus musculus
atggttttgagaggtgttagagttgttgaattggctggtttagcaccaggtccattttgtggtatggttttagctgattttggtgcagaagttgttagagttaatagattgggttctactggtgaaaatttcttggctagaggtaaaagatcattggctttggatttgaaaagatcacaaggtgtcacagttttgagaagaatgtgtgctagagcagatgttttgttagaaccttttagatgtggtgttatggaaaaattgcaattaggtccagaaactttgttgcaagataacccaaaattgatctatgctagattgtctggttttggtcaatctggtattttctctaaggttgctggtcatgatattaactatttggcattgtctggtgttttgtcaaaaattggtagatcaggtgaaaatccatacccaccattaaatttgttagctgattttggtggtggtggtttgatgtgtactttgggtatcgttttggcattgttcgaaagaactagatcaggtagaggtcaagttattgattcttcaatggttgaaggtactgcttatttgtcttcatttttatggaagacacaaccaatgggtttgtggaagcaaccaagaggtcaaaacattttagatggtggtgctccattttatactacatacaaaactgcagatggcgagtttatggctgttggtgcaatcgaaccacaattctacgctttgttgttgaagggtttgggtttagaatctgaagaattaccatcacaaatgtcttcagcagattggccagaaatgaaaaagaaattcgctgatgttttcgctaagaaaactaaggctgaatggtgtcaaatttttgatggtacagatgcatgtgttactccagttttgacatttgaagaagcattgcatcatcaacataacagagaaagagcatcttttattacagatggtgaacaattgccatctccaagaccagctccattattgtcaagaactccagctgttccatctgcaaaaagagatccatcagttggtgaacatacagttgaagttttgagagaatacggtttttcacaagaagaaattttgcaattgcattctgatagaattgttgaatcagataaattgaaagctaatttgtaa

SEQ ID NO: 151 - protein, 382 aa, Ictalurus furcatus
MALAGVRVIELAGLAPAPFCGMILSDFGARVIRVDRTKVTMAMDAQARGKQSVALNLKSPQGVAVLKKLCLQSDIVLEPFRKGVMEKLGLGPEELLKENPRLIYARLTGYGQSGSYAKSAGHDINYLAMSGLLSMLGRSSEKPYAPLNLVADFAGGGLMCALGIVLALLERNESGQGQIIDASMVEGAAYVGSFMWKSRSLGLWNRPRGENMLDSGAPFYDTYQTSDGKHMAVGAIEPQFYDHLIKGLGLDAASLPAQMSISDWTELRRTFTQVFAQKTQAEWSRIFDGTDACVTPVLPLDEAGSHPHNRERGSFLKDAQGEVSPRPAPVLSRTPARPCLSRDPVVGEHTRSVLGEYGFDPDHIEQLLSAGVVECNEAKARL

SEQ ID NO: 152 - DNA, 1149 bp, Ictalurus furcatus
atggctttagcaggtgttagagttattgaattggctggtttagctccagcaccattttgtggtatgattttgtctgattttggtgctagagttattagagttgatagaactaaggttacaatggcaatggatgctcaagcaagaggtaaacaatctgttgctttgaatttgaagtcaccacaaggtgttgcagttttgaagaaattgtgtttgcaatctgatattgttttggaaccttttagaaagggtgttatggaaaaattgggtttgggtccagaagaattgttgaaggaaaacccaagattgatctatgctagattgactggttacggtcaatctggttcttatgctaagtcagcaggtcatgatattaactacttagctatgtctggtttgttatcaatgttgggtagatcatctgaaaaaccatacgctccattgaatttggttgctgattttgctggtggtggtttgatgtgtgctttaggtatcgttttggcattgttagaaagaaacgaatctggtcaaggtcaaattattgatgcttcaatggttgaaggtgctgcatacgttggttcttttatgtggaaatcaagatcattgggtttatggaatagaccaagaggtgaaaatatgttagattctggtgcaccattttatgatacttaccaaacatcagatggtaaacacatggctgttggtgcaatcgaaccacaattctacgatcatttgattaaaggtttgggtttagatgctgcatctttgccagctcaaatgtctatttcagattggactgaattaagaagaacttttacacaagttttcgctcaaaagactcaagcagaatggtcaagaatttttgatggtactgatgcttgtgttacaccagttttgccattagatgaagcaggttctcatccacataacagagaaagaggttcatttttgaaagatgctcaaggtgaagtttctccaagaccagctccagttttatcaagaactccagcaagaccatgtttgtcaagagatccagttgttggtgaacatacaagatcagttttgggtgaatacggtttcgatccagatcatatcgaacaattgttatctgctggtgttgttgaatgtaatgaagctaaagcaagattgtaa

SEQ ID NO: 153 - protein, 378 aa, Pediculus humanus subsp. corporis
MPLKGIKVLELAGLAPSPFCGAILADFGASVIRIDKISSSSTADCLSNGKKSLALNLKDEEGKNIFKKLSSNADVLLEPFRKGVMESLELGPENLMKSNPRLIYARLSGFGQYGLYSSRAGHDINFLSVSGVLSFLGRYNEKPTPPVNLLADFGGGGLLCALGIVLALFERTKSNKGQIIDCSMVEGVAYLSSWLFRSQKLPIWGNERGLNILDTGSHFYDTYETKDGKFLAVGALETQFYKILTDHLKSNDLSDQWSDFSKKKKIITDIFKTKNRDEWCEIFDNVDACVTPVLDKTEVGDHVHNKERESFTRLTDGTMIPNPAPKLSRTPGVTKAKVSHVENGFNSEEILLELGYNKEEIKELDLNGVIKIITSSKL

SEQ ID NO: 154 - DNA, 1137 bp, Pediculus humanus subsp. corporis
atgccattgaagggtattaaagttttggaattagctggtttagcaccatctccattttgtggtgctattttggcagattttggtgcttcagttattagaatcgataaaatttcttcatcttcaacagctgattgtttgtctaacggtaaaaagtctttggctttgaatttgaaggatgaagaaggtaaaaatatttttaagaaattgtcttctaacgcagatgttttgttagaaccttttagaaagggtgttatggaatctttagaattgggtccagaaaatttgatgaagtctaacccaagattgatctatgctagattgtcaggttttggtcaatatggtttatactcttcaagagcaggtcatgatattaatttcttgtctgtttcaggtgttttgtcatttttgggtagatacaacgaaaaaccaacaccaccagttaatttgttagctgattttggtggtggtggtttgttatgtgctttgggtatcgttttagcattgttcgaaagaactaagtctaataagggtcaaatcattgattgttcaatggttgaaggtgttgcatatttgtcttcttggttgtttagatcacaaaaattgccaatttggggtaacgaaagaggtttgaacattttggatacaggttcacatttctacgatacttacgaaacaaaggatggtaaattcttggctgttggtgcattggaaacacaattctacaaaattttgactgatcatttgaagtctaacgatttgtcagatcaatggtctgatttctctaagaaaaagaaaattatcacagatatttttaaaactaaaaatagagatgaatggtgtgaaatttttgataacgttgatgcttgtgttacaccagttttggataaaactgaagttggtgaccatgttcataataaggaaagagaatcttttactagattgacagatggtactatgattccaaatccagctccaaaattgtcaagaacaccaggtgttactaaggcaaaagtttctcatgttgaaaacggttttaattcagaagaaattttgttagaattaggttataataaggaagaaattaaagaattagatttgaatggtgttattaaaattattacttcttcaaaattgtaa

SEQ ID NO: 155 - protein, 386 aa, Ixodes scapularis
MVMALKGIKVLEMAGLAPGPFCGMVLRDFGATVIRVDRVSPIRNLSDNIPACLSKCRDKGGTYRCAVPSPRQDCSRQCLANAGVMERVGLGPDVLLQTNPRLVYARITGFGQTGPFSMMAGHDINYLALSGVLSMLGEHGRKPIFPVNVIADFGGGGLLAALGICMALLERTRSGRGQVVDTSMASTRSAYLSSFLWRTRSSNMAVPIWIDERGKNILDGGTHFYNVYETKDRKYMSVGALEPNFYKELSWVRLGLEPDTVPQMGDWEESKRVFAEIFATKTQDEWCRVFDQKDACVVPVLDHDTAHKHPHNASREAFHECSDGPPIPRPAPRLDRTPAEPDYKEPLVGEHSVEVLKEAGLSDGEIRTLLQSGTVEAPCFDPNLRL

SEQ ID NO: 156 - DNA, 1161 bp, Ixodes scapularis
atggttatggctttgaaaggtattaaagttttggaaatggctggtttagcaccaggtccattttgtggtatggttttgagagatttcggtgcaactgttattagagttgatagagtttcaccaatcagaaatttgtctgataacatcccagcttgtttgtctaagtgtagagataaaggtggtacatatagatgtgcagttccatcaccaagacaagattgttcaagacaatgtttggctaatgcaggtgttatggaaagagttggtttaggtccagatgttttgttgcaaactaacccaagattggtttatgctagaattactggttttggtcaaacaggtccattttctatgatggctggtcatgatattaactacttggcattgtcaggtgttttgtctatgttaggtgaacatggtagaaagccaatcttcccagttaacgttatcgctgattttggtggtggtggtttgttagctgcattgggtatttgtatggcattgttagaaagaactagatcaggtagaggtcaagttgttgatacttctatggcttctactagatcagcatacttgtcttcatttttatggagaactagatcatctaacatggctgttccaatttggatcgatgaaagaggtaaaaatattttagatggtggtactcatttctacaacgtttacgaaacaaaggatagaaaatatatgtctgttggtgctttggaaccaaacttctacaaggaattatcatgggttagattgggtttagaaccagatacagttccacaaatgggtgactgggaagaatctaaaagagttttcgctgaaatttttgcaactaagacacaagatgaatggtgtagagtttttgatcaaaaagatgcttgtgttgttccagttttagatcatgatactgcacataaacatccacataatgcttcaagagaagcatttcatgaatgttctgatggtccaccaattccaagaccagctccaagattggatagaacaccagcagaaccagattacaaggaaccattagttggtgaacattcagttgaagttttgaaagaagctggtttgtctgatggtgaaatcagaactttgttacaatcaggtacagttgaagcaccatgttttgatccaaatttgagattataa

SEQ ID NO: 157 - protein, 382 aa, Bos taurus
MALRGITVVELAGLAPVPFCGMVLADFGAQVVRVDRPAARSGPSRLARGKRSLVVDLKQPRGAAVLRRLCARADVMLEPFRPGVMEKLQLGPEILQKENPRLIYARLSGFGQSGRFSKMAGHDINYLALSGVLSRIGRSGENPYAPLNLLADFGGGGLMCAMGIIMALFERTRSGKGQVIDASMVEGTAYLSSFMWKTQETGLWEQPRGQNMLDGGAPFYTTYRTADGGFMAVGAIEPQFYELLIKGLGLKSDELPNQLSMKDWPEMKKKFADIFAKKTKAEWCQIFDGTDACVTPVLTFEEVTHHGHNKDRGSFITDTEQRVSPRPAPLLSNTPALPSIKRDPFVGEHTEEILKEFGFSQKEINQLKLDNIIEIHKLRVNL

SEQ ID NO: 158 - DNA, 1149 bp, Bos taurus
atggctttgagaggtattactgttgttgaattggctggtttagcaccagttccattttgtggtatggttttagctgattttggtgcacaagttgttagagttgatagaccagctgcaagatcaggtccatcaagattggctagaggtaaaagatcattggttgttgatttgaagcaaccaagaggtgctgcagttttgagaagattatgtgctagagcagatgttatgttggaaccttttagaccaggtgttatggaaaaattgcaattgggtccagaaattttacaaaaggaaaacccaagattgatctatgctagattgtctggtttcggtcaatctggtagattttcaaagatggctggtcatgatattaactatttggcattgtctggtgttttgtcaagaattggtagatcaggtgaaaatccatacgctccattaaatttgttagcagattttggtggtggtggtttgatgtgtgctatgggtatcatcatggcattgttcgaaagaactagatcaggtaaaggtcaagttattgatgcttcaatggttgaaggtacagcatatttgtcttcttttatgtggaagactcaagaaacaggtttgtgggaacaaccaagaggtcaaaatatgttagatggtggtgctccattttatactacatacagaactgcagatggtggttttatggctgttggtgcaatcgaaccacaattctacgaattgttgattaaaggtttgggtttgaagtctgatgaattgccaaaccaattgtcaatgaaggattggccagaaatgaaaaagaaattcgctgatattttcgctaagaaaactaaggctgaatggtgtcaaatttttgatggtacagatgcatgtgttactccagttttgacattcgaagaagttacacatcatggtcataataaggatagaggttcttttattactgatacagaacaaagagtttcaccaagaccagctccattgttatctaatactccagcattgccatcaattaaaagagatccatttgttggtgaacatacagaagaaattttaaaagaatttggtttttctcaaaaagaaattaatcaattgaaattggataatattattgaaattcataaattgagagttaatttgtaa

SEQ ID NO: 159 - protein, 681 aa, Homo sapiens
MGSPVHRVSLGDTWSRQMHPDIESERYMQSFDVERLTNILDGGAQNTALRRKVESIIHSYPEFSCKDNYFMTQNERYKAAMRRAFHIRLIARRLGWLEDGRELGYAYRALSGDVALNIHRVFVRALRSLGSEEQIAKWDPLCKNIQIIATYAQTELGHGTYLQGLETEATYDAATQEFVIHSPTLTATKWWPGDLGRSATHALVQAQLICSGARRGMHAFIVPIRSLQDHTPLPGIIIGDIGPKMDFDQTDNGFLQLNHVRVPRENMLSRFAQVLPDGTYVKLGTAQSNYLPMVVVRVELLSGEILPILQKACVIAMRYSVIRRQSRLRPSDPEAKVLDYQTQQQKLFPQLAISYAFHFLAVSLLEFFQHSYTAILNQDFSFLPELHALSTGMKAMMSEFCTQGAEMCRRACGGHGYSKLSGLPSLVTKLSASCTYEGENTVLYLQVARFLVKSYLQTQMSPGSTPQRSLSPSVAYLTAPDLARCPAQRAADFLCPELYTTAWAHVAVRLIKDSVQHLQTLTQSGADQHEAWNQTTVIHLQAAKVHCYYVTVKGFTEALEKLENEPAIQQVLKRLCDLHAIHGILTNSGDFLHDAFLSGAQVDMARTAYLDLLRLIRKDAILLTDAFDFTDQCLNSALGCYDGNVYERLFQWAQKSPTNTQENPAYEEYIRPLLQSWRSKL

SEQ ID NO: 160 - DNA, 2046 bp, Homo sapiens
atgggttcaccagttcatagagtttctttaggtgacacatggtcaagacaaatgcatccagatatcgaatctgaaagatacatgcaatcattcgatgttgaaagattgacaaacatcttggatggtggtgctcaaaacactgcattgagaagaaaggttgaatcaattattcattcttatccagaattttcttgtaaggataactacttcatgactcaaaatgaaagatacaaagctgcaatgagaagagctttccatatcagattgatcgcaagaagattgggttggttagaagatggtagagaattgggttatgcttacagagcattatctggtgacgttgctttgaacatccatagagttttcgttagagcattgagatcattaggttctgaagaacaaattgctaaatgggacccattgtgtaagaacatccaaatcatcgctacatacgcacaaactgaattgggtcatggtacatacttgcaaggtttagaaacagaagctacttatgatgctgcaactcaagaattcgttatccattctccaactttgacagctactaaatggtggcctggtgacttgggtagatctgctactcatgcattagttcaagctcaattgatttgttcaggtgctagacgtggtatgcatgcttttattgttccaatcagatctttacaagatcatacaccattgccaggtatcatcatcggtgacatcggtccaaagatggatttcgatcaaactgataacggtttcttgcaattgaaccatgttagagttccaagagaaaacatgttgtcaagattcgctcaagttttgccagatggtacatacgttaagttgggtactgcacaatctaactatttgccaatggttgttgttagagttgaattgttgtcaggtgaaatcttgccaatcttgcaaaaggcttgtgttatcgcaatgagatactctgttattagaagacaatcaagattaagaccatctgatccagaagctaaagttttggattaccaaacacaacaacaaaagttgttcccacaattggctatctcttacgcattccatttcttggctgtttctttgttggaatttttccaacattcatacactgcaatcttgaaccaagatttctcatttttgccagaattgcatgctttgtctactggtatgaaagcaatgatgtcagaattttgtactcaaggtgctgaaatgtgtagaagagcatgtggtggtcatggttactcaaagttgtctggtttgccatctttagttacaaagttgtctgcttcatgtacatacgaaggtgaaaacactgttttgtacttacaagttgcaagatttttagtcaagtcatacttgcaaacacaaatgtcaccaggttctactccacaaagatctttgtcaccatctgttgcttatttgactgcaccagatttggctagatgtccagcacaaagagctgcagatttcttgtgtccagaattgtacactacagcttgggcacatgttgctgttagattgattaaagattctgttcaacatttgcaaacattaactcaatcaggtgctgatcaacatgaagcatggaatcaaactacagttattcatttgcaagctgcaaaggttcattgttactacgttacagttaagggttttactgaagctttggaaaagttggaaaacgaaccagcaatccaacaagttttgaagagattgtgtgatttgcatgctatccatggtattttaacaaactctggtgactttttgcatgatgcatttttgtcaggtgcacaagttgatatggctagaactgcatatttggatttgttgagattgatcagaaaggatgctatcttgttgacagatgcattcgatttcactgatcaatgtttgaactctgctttgggttgttacgatggtaacgtttacgaaagattgtttcaatgggctcaaaaatcaccaacaaacactcaagaaaacccagcatacgaagaatacatcagaccattgttgcaatcatggagatctaaattgtaa

SEQ ID NO: 161 - protein, 681 aa, Rattus norvegicus
MGSPMHRVSLGDHWSWQVHPDIDSERHSPSFSVERLTNILDGGLPNTVLRRKVESIIQSDPVFNLKKLYFMTREELYEDAIQKRFHLEKLAWSLGWSEDGPERIYANRVLDGNVNLSLHGVAMNAIRSLGSDEQIAKWGQLCKNFQIITTYAQTELGHGTYLQGLETEATYDEARQELVIHSPTMTSTKWWPGDLGWSVTHAVVLAQLTCLGVRHGMHAFIVPIRSLEDHTPLPGITVGDIGPKMGLEHIDNGFLQLNHVRVPRENMLSRFAEVLPDGTYQRLGTPQSNYLGMLVTRVQLLCKGILPSLQKACIIATRYSVIRHQSRLRPSDPEAKILEYQTQQQKLLPQLAVSYAFHFTATSLSEFFHSSYSAILKRDFSLLPELHALSTGMKATFADFCAQGAEICRRACGGHGYSKLSGLPTLVARATASCTYEGENTVLYLQVARFLMKSYLQAQASPGATPQKPLPQSVMYIATQRPARCSAQTAADFRCPDVYTTAWAYVSTRLIRDAAHRTQTLMKSGVDQHDAWNQTTVIHLQAAKAHCYFITVKNFKEAVEKLDKEPEIQRVLQRLCDLYALHGVLTNSGDFLHDGFLSGAQVDMAREAFLDLLPLIRKDAILLTDAFDFSDHCLNSALGCYDGHVYERLFEWAQKYPANTQENPAYKKYIRPLMLGWRHKM

SEQ ID NO: 162 - DNA, 2046 bp, Rattus norvegicus
atgggttcaccaatgcatagagtttctttaggtgaccattggtcatggcaagttcatccagatattgattctgaaagacattctccatcattttctgttgaaagattgacaaacatcttggatggtggtttgccaaacactgttttgagaagaaaggttgaatcaatcattcaatctgatccagtttttaatttgaagaaattgtacttcatgacaagagaagaattgtacgaagatgcaatccaaaagagattccatttggaaaagttggcttggtcattaggttggtctgaagatggtccagaaagaatctatgctaacagagttttggatggtaacgttaatttgtctttacatggtgttgcaatgaatgctatcagatcattaggttctgatgaacaaattgcaaaatggggtcaattgtgtaagaacttccaaatcatcactacatatgctcaaacagaattgggtcatggtacttacttgcaaggtttagaaacagaagcaacttacgatgaagctagacaagaattagttattcattcaccaactatgacatctactaaatggtggcctggtgacttgggttggtctgttacacatgcagttgttttggctcaattaacttgtttgggtgttagacatggtatgcatgcttttattgttccaatcagatcattagaagatcatacaccattgccaggtattactgttggtgacattggtccaaagatgggtttagaacatatcgataacggtttcttgcaattgaaccatgttagagttccaagagaaaacatgttgtctagattcgctgaagttttgccagatggtacataccaaagattgggtactccacaatcaaactatttgggcatgttggttacaagagttcaattgttgtgtaagggtattttaccatctttgcaaaaggcatgtatcatcgctactagatactcagttattagacatcaatcaagattaagaccatctgatccagaagctaagatcttggaataccaaactcaacaacaaaagttgttgccacaattggcagtttcttacgctttccatttcacagcaacttcattgtctgaatttttccattcttcatactctgctatcttgaagagagatttctcattgttgccagaattgcatgcattgtctactggtatgaaagcaacttttgctgatttttgtgcacaaggtgctgaaatttgtagaagagcttgtggtggtcatggttactcaaagttgtctggtttgccaacattagttgctagagcaacagcttcttgtacttacgaaggtgaaaacactgttttgtacttacaagttgctagatttttaatgaagtcttacttgcaagcacaagcttcaccaggtgcaacaccacaaaaaccattgccacaatctgttatgtatattgctacacaaagaccagcaagatgttcagctcaaactgctgcagattttagatgtccagatgtttatactacagcatgggcttacgtttctactagattaattagagatgctgcacatagaacacaaactttgatgaaatcaggtgttgatcaacatgatgcttggaatcaaactacagttattcatttgcaagctgcaaaagcacattgttacttcatcacagttaaaaatttcaaagaagctgttgaaaagttggataaggaaccagaaatccaaagagttttgcaaagattgtgtgatttgtacgcattgcatggtgttttgactaactctggtgactttttgcatgatggtttcttgtcaggtgctcaagttgatatggcaagagaagcatttttggatttgttgccattgatcagaaaggatgcaatcttgttgacagatgctttcgatttctctgatcattgtttgaactcagcattgggttgttatgatggtcatgtttacgaaagattgtttgaatgggcacaaaagtacccagctaacactcaagaaaacccagcttacaagaaatacatcagaccattgatgttaggttggagacataaaatgtaa

SEQ ID NO: 163 - protein, 681 aa, Mus musculus
MGNPGDRVSLGETWSREVHPDIDSERHSPSFSVERLTNILDGGIPNTELRRRVESLIQRDPVFNLKHLYFMTRDELYEDAVQKRFHLEKLAWSLGWSEDGPERIYADRVLAGYNNLNLHGIAMNAIRSLGSDEQIAKWGQLGKNFQIITTYAQTELGHGTYLQGLETEATYDATTQEFVIHSPTMTSIKWWPGDLGRTVTHAVVLAHLICLGARHGMHAFIVPIRSLEDHTPLPGITVGDIGPKMGFENIDNGFLRLNHVRVPRENMLSRFAEVLPDGTYQRLGTPQSNYLGMLVTRVQLLYKGFLPTLQKACTIAVRYAVIRHQSRLRPSDPEAKILEYQTQQQKLLPQLAVSYALHFMTTSLLQFFHSSYSDILKRDFSLLPELHALSTGMKAMSSDFCAQGTEICRRACGGHGYSKLSGLPTLVTQAIASCTYEGENTVLYLQVARFLMKSYLQAQVSPGSIPQKPLPQSVMYLATPRPARCPAQTAADFRCPEVYTTAWAYVSARLIRDATQHTQTLMRSGVDQYDAWNQTSVIHLQAAKAHCYFLTVRNFKEAVEKLDNEPEIQRVLQNLCDLYALNGILTNSGDFLHDGFLSGAQVDMARTAFLDLLPLIRKDAILLTDAFDFSDHCLNSALGCYDGHVYQRLFEWAQKSPANTQENPAYKKYIRPLMQSWKPKL

SEQ ID NO: 164 - DNA, 2046 bp, Mus musculus
atgggtaatccaggtgacagagtttctttgggtgaaacttggtctagagaagttcatccagatattgattcagaaagacattctccatcattttctgttgaaagattgactaacatcttggatggtggtattccaaacacagaattgagaagaagagttgaatctttgatccaaagagatccagtttttaatttgaagcatttgtacttcatgacaagagatgaattatacgaagatgctgttcaaaagagattccatttggaaaagttggcatggtcattgggttggtctgaagatggtccagaaagaatctatgcagatagagttttggctggttacaacaatttgaatttgcatggtattgctatgaatgcaattagatcattgggttctgatgaacaaattgctaaatggggtcaattgggtaaaaatttccaaatcatcactacatatgcacaaactgaattgggtcatggtacatacttgcaaggtttagaaactgaagctacatacgatgcaactacacaagaattcgttatccattcaccaactatgacatctattaaatggtggcctggtgacttgggtagaactgttacacatgctgttgttttggcacatttgatttgtttgggtgcaagacatggtatgcatgcttttattgttccaatcagatctttggaagatcatactccattaccaggtattacagttggtgacatcggtccaaagatgggtttcgaaaacatcgataacggtttcttgagattgaaccatgttagagttccaagagaaaacatgttgtcaagattcgctgaagttttaccagatggtacttaccaaagattgggtacaccacaatctaactatttgggcatgttggttactagagttcaattgttgtacaagggtttcttgccaactttgcaaaaagcttgtacaattgcagttagatacgctgttattagacatcaatcaagattaagaccatctgatccagaagctaagatcttggaataccaaacacaacaacaaaagttgttgccacaattggcagtttcatacgctttgcatttcatgactacatctttgttgcaatttttccattcttcatactcagatatcttgaagagagatttctctttgttgccagaattgcatgcattgtcaactggtatgaaagctatgtcttcagatttttgtgcacaaggtacagaaatttgtagaagagcttgtggtggtcatggttactcaaagttgtctggtttgccaactttagttacacaagctattgcatcttgtacttacgaaggtgaaaacacagttttgtacttacaagttgctagatttttgatgaagtcatacttacaagcacaagtttcaccaggttctattccacaaaaaccattgccacaatctgttatgtatttggctactccaagaccagcaagatgtccagctcaaacagctgcagattttagatgtccagaagtttatactacagcttgggcatacgtttctgcaagattgattagagatgctactcaacatactcaaacattaatgagatcaggtgttgatcaatacgatgcttggaatcaaacttctgttattcatttgcaagctgcaaaagctcattgttactttttgacagttagaaacttcaaggaagcagttgaaaagttggataacgaaccagaaatccaaagagttttgcaaaatttgtgtgatttgtacgctttgaacggtattttaacaaactctggtgactttttgcatgatggtttcttgtctggtgcacaagttgatatggctagaactgcatttttggatttgttgccattgatcagaaaggatgcaatcttgttgacagatgctttcgatttctcagatcattgtttgaactctgctttaggttgttatgatggtcatgtttaccaaagattgtttgaatgggcacaaaaatcaccagctaacactcaagaaaacccagcttacaagaaatacatcagaccattgatgcaatcttggaaaccaaaattataa

SEQ ID NO: 165 - protein, 681 aa, Oryctolagus cuniculus
MGIPVHRVSLGDAWSSRMHPDMESERCAQSFSVERLTNILDGGAQHTALRRKVESIIHGNPQFSSKDNYFMSQNELYEAATRKRYHLQKIAQRMGWTEEGRELEYAHRALSADLNLNLQGIFLKALRSLGSEEQIAKWEPLGKTFQIISTYAQTELGHGTYLQGLETEATYDAATQEFVIHSPTVTATKWWPGDLGRSATHALILAQLICSGARRGMHAFIVPVRSLQDHTPLPGITIGDIGPKMGLQHIDNGFLKMDHVRVPRENMLSRFAQVLPDGAYIKLGTAQSNYLGMLVTRVHLLLGAILSPLQKACVIATRYSVIRHQCRLRPSDPEVKILEHQTQQQKLFPQLAMCYAFHFLATGLLEFFQQAYKNILDRDFTLLPELHALSTGTKAMMSDFCTQGAEQCRRACGGHGYSKLSGLPSLVTSVTASCTYEGENTVLYLQVARFLVKSCLQAQGFPGSTSQRSLPRSVSYLALPDLARCPAQTAADFFCPALYTAAWAHVAARLTKDSVHHLQALRQSGADEHEAWNQTTIIHLQAAKAHCYYISVKSFKEALEKLENEPAIQQVLKRLCDLHALHGILTNSGDFLHDGFLSGAQVDMARTAYMDLLPLIRKDAILLTDAFDFTDQCLNSALGCYDGNVYERLFEWAQRSPTNTQENPAYKKYIQPLLQSWRSNL

SEQ ID NO: 166 - DNA, 2046 bp, Oryctolagus cuniculus
atgggtattccagttcatagagtttcattgggtgacgcttggtcttcaagaatgcatccagatatggaatctgaaagatgtgcacaatctttttcagttgaaagattgacaaacatcttagatggtggtgcacaacatactgctttgagaagaaaggttgaatcaatcatccatggtaacccacaattttcttcaaaggataactacttcatgtctcaaaatgaattgtacgaagctgcaactagaaagagataccatttgcaaaagattgctcaaagaatgggttggacagaagaaggtagagaattggaatatgctcatagagcattgtctgctgatttgaatttgaatttgcaaggtattttcttgaaggctttgagatctttgggttcagaagaacaaattgcaaaatgggaaccattgggtaaaactttccaaatcatctctacatacgctcaaactgaattaggtcatggtacttatttgcaaggtttggaaacagaagcaacttacgatgctgcaacacaagaattcgttatccattctccaactgttacagctactaaatggtggcctggtgacttgggtagatcagcaacacatgctttgatcttggcacaattgatctgttctggtgcaagacgtggtatgcatgcttttattgttccagttagatctttgcaagatcatacaccattaccaggtattactattggtgacattggtccaaaaatgggtttgcaacatatcgataacggtttcttgaagatggatcatgttagagttccaagagaaaacatgttgtcaagattcgcacaagttttgccagatggtgcttacatcaagttgggtacagcacaatctaactacttaggcatgttggttactagagttcatttgttgttgggtgctattttatcaccattgcaaaaggcatgtgttatcgctactagatactcagttattagacatcaatgtagattaagaccatctgatccagaagttaagatcttggaacatcaaacacaacaacaaaagttgttcccacaattggcaatgtgttacgctttccatttcttggctactggtttattggaatttttccaacaagcatacaagaacatcttggatagagatttcacattgttgccagaattgcatgctttgtcaacaggtactaaagcaatgatgtctgatttttgtactcaaggtgcagaacaatgtagaagagcttgtggtggtcatggttactctaaattatcaggtttgccatctttagttacatcagttactgcttcttgtacatacgaaggtgaaaacactgttttgtatttgcaagttgctagatttttggttaagtcatgtttgcaagcacaaggttttccaggttctacttcacaaagatctttgccaagatctgtttcatatttggctttaccagatttggcaagatgtccagctcaaacagctgcagatttcttttgtccagctttgtacactgctgcatgggcacatgttgctgcaagattgacaaaggattcagttcatcatttgcaagctttaagacaatctggtgcagatgaacatgaagcttggaaccaaactacaatcatccatttgcaagctgcaaaagctcattgttactacatctctgttaagtcttttaaagaagctttggaaaagttggaaaacgaaccagcaatccaacaagttttgaagagattgtgtgatttgcatgctttgcatggtattttgactaattctggtgactttttgcatgatggtttcttgtctggtgcacaagttgatatggcaagaacagcttacatggatttgttgccattgatcagaaaggatgcaatcttgttgacagatgctttcgatttcactgatcaatgtttgaactctgctttaggttgttacgatggtaacgtttacgaaagattgttcgaatgggctcaaagatcaccaacaaacactcaagaaaacccagcatacaagaaatacatccaaccattgttgcaatcttggagatcaaatttgtaa

SEQ ID NO: 167 - protein, 661 aa, Caenorhabditis elegans
MANRSIRDGDNPELLEERRMATFDTDKMAAVIYGSEEFARRRREITDAVSKIPELADIKPYPFLTREEKVTEGTRKISILTKYLNQLIDRDNEEESLHLHREVIGYEGHPFALHDALFIPTLQSQASDEQQEKWLERARRREIIGCYAQTELGHGSNLRNLETTAVYDIASQEFVLHTPTTTALKWWPGALGKSCNYALVVAELIIKRNNYGPHFFMVQLRDEKTHIPLKGVTVGDIGPKMNFNAADNGYLGLNNLRVPRTNLLMRHCKVEADGTYVKPPHAKIGYSGMVKIRSQMAMEQGLFLAHALTIAARYSAVRRQGHLDDKQVEVKVLDYQTQQHRLFPSLARAYAFIFTGFETIHLYSQLLKDVDMGNTSGMADLHALTSGLKSVVAHETGEGIEQARMACGGHGYSMASYISVVYGIAIGGCTYEGENMVMLLQLARYLVKSVELIKAGKAKKLGPVASYLADKSDETDLTSLNGYVKMFENMARRQAWKATEKFLKLMESGESREVAWNKSAVELTRASRLHTRLFIIEAFMRRVSRIEDIPVKEVLTDLLHLHVNYELLDVATYALEFMSFTQLDYVRDQLYLYLEKIRPNAVSLVDSFQISDMQLRSVLGRRDGHVYENLFKWAKSSPLNNADVLPSVEKYLKPMMEKAKL

SEQ ID NO: 168 - DNA, 1986 bp, Caenorhabditis elegans
atggctaatagatctattagagatggtgacaatccagaattgttagaagaaagaagaatggcaacattcgatactgataagatggctgctgttatatatggttctgaagaattcgctagaagaagaagagaaatcacagatgcagtttcaaagatcccagaattggctgatatcaagccatacccatttttgacaagagaagaaaaggttacagaaggtactagaaagatctctatcttgactaagtatttgaatcaattgattgatagagataacgaagaagaatcattgcatttgcatagagaagttattggttatgaaggtcatccatttgcattgcatgatgctttgtttattccaactttgcaatctcaagcttcagatgaacaacaagaaaaatggttggaaagagcaagaagaagagaaattattggttgttacgctcaaacagaattgggtcatggttctaatttgagaaatttggaaactacagcagtttacgatatcgcttcacaagaattcgttttgcatactccaactacaactgcattaaaatggtggccaggtgctttgggtaaatcttgtaattacgcattagttgttgctgaattgattattaagagaaacaactacggtccacatttctttatggttcaattgagagatgaaaagactcatatcccattgaaaggtgttactgttggtgacattggtccaaagatgaacttcaacgctgcagataacggttatttgggtttaaacaatttgagagttccaagaacaaatttgttgatgagacattgtaaagttgaagcagatggtacttacgttaaaccaccacatgctaagatcggttactctggtatggttaagatcagatcacaaatggcaatggaacaaggtttgtttttagctcatgcattgacaattgctgcaagatactctgctgttagaagacaaggtcatttggatgataagcaagttgaagttaaggttttggattaccaaactcaacaacatagattgttcccatctttggctagagcatacgcttttatttttacaggtttcgaaactatccatttgtactctcaattgttgaaggatgttgatatgggtaacacatcaggcatggcagatttgcatgctttgacttcaggtttgaaatctgttgttgctcatgaaacaggtgaaggtattgaacaagcaagaatggcttgtggtggtcatggttattctatggcatcatacatctctgttgtttacggtatcgctattggtggttgtacttacgaaggtgaaaacatggttatgttgttgcaattggcaagatatttggttaagtctgttgaattgattaaagctggtaaagctaagaaattaggtccagttgcatcttacttggctgataagtcagatgaaacagatttgacttcattgaacggttacgttaagatgttcgaaaatatggctagaagacaagcatggaaggctacagaaaagttcttgaagttgatggaatctggtgaatctagagaagttgcatggaataagtctgctgttgaattgacaagagcatcaagattgcatactagattgtttattattgaagcttttatgagaagagtttctagaatcgaagatatcccagttaaggaagttttgactgatttgttgcatttgcatgttaactacgaattgttggatgttgcaacatacgctttggaattcatgtcttttactcaattggattacgttagagatcaattgtatttgtacttggaaaagattagaccaaacgctgtttcattagttgattctttccaaatctcagatatgcaattaagatctgttttgggtagaagagatggtcatgtttacgaaaatttgtttaaatgggcaaagtcttcaccattaaacaacgctgatgttttgccatcagttgaaaagtatttgaagccaatgatggaaaaagctaaattgtaa

SEQ ID NO: 169 - protein, 692 aa, Arabidopsis thaliana
MESRREKNPMTEEESDGLIAARRIQRLSLHLSPSLTPSPSLPLVQTETCSARSKKLDVNGEALSLYMRGKHIDIQEKIFDFFNSRPDLQTPIEISKDDHRELCMNQLIGLVREAGVRPFRYVADDPEKYFAIMEAVGSVDMSLGIKMGVQYSLWGGSVINLGTKKHRDKYFDGIDNLDYTGCFAMTELHHGSNVQGLQTTATFDPLKDEFVIDTPNDGAIKWWIGNAAVHGKFATVFARLILPTHDSKGVSDMGVHAFIVPIRDMKTHQTLPGVEIQDCGHKVGLNGVDNGALRFRSVRIPRDNLLNRFGDVSRDGTYTSSLPTINKRFGATLGELVGGRVGLAYASVGVLKISATIAIRYSLLRQQFGPPKQPEVSILDYQSQQHKLMPMLASTYAYHFATVYLVEKYSEMKKTHDEQLVADVHALSAGLKSYVTSYTAKALSVCREACGGHGYAAVNRFGSLRNDHDIFQTFEGDNTVLLQQVAADLLKRYKEKFQGGTLTVTWSYLRESMNTYLSQPNPVTARWEGEDHLRDPKFQLDAFRYRTSRLLQNVAARLQKHSKTLGGFGAWNRCLNHLLTLAESHIETVILAKFIEAVKNCPDPSAKAALKLACDLYALDRIWKDIGTYRNVDYVAPNKAKAIHKLTEYLSFQVRNVAKELVDAFELPDHVTRAPIAMQSDAYSQYTQVVGF

SEQ ID NO: 170 - DNA, 2079 bp, Arabidopsis thaliana
atggaatctagaagagaaaagaatccaatgacagaagaagaatcagatggtttgattgctgcaagaagaattcaaagattgtctttgcatttgtctccatcattaactccatctccatcattaccattggttcaaactgaaacatgttctgcaagatctaagaaattggatgttaacggtgaagctttgtcattgtacatgagaggtaaacatatcgatatccaagaaaagatttttgatttctttaactctagaccagatttgcaaacaccaatcgaaatctcaaaggatgatcatagagaattgtgtatgaaccaattgatcggtttggttagagaagcaggtgttagaccttttagatatgttgctgatgatccagaaaagtacttcgctatcatggaagcagttggttctgttgatatgtcattgggtattaaaatgggtgttcaatactctttgtggggtggttcagttattaatttgggtactaagaaacatcgtgataagtacttcgatggtatcgataatttggattacacaggttgttttgcaatgactgaattacatcatggttctaatgttcaaggtttgcaaactacagctacattcgatccattgaaggatgaattcgttattgatactccaaatgatggtgctattaaatggtggattggtaatgctgcagttcatggtaaattcgctacagttttcgcaagattgatcttgccaactcatgattctaaaggtgtttcagatatgggtgttcatgcttttattgttccaatcagagatatgaagacacatcaaactttgccaggtgttgaaattcaagattgtggtcataaggttggtttaaacggtgttgataatggtgctttgagattcagatctgttagaattccaagagataatttgttgaacagattcggtgacgtttcaagagatggtacttacacatcttcattgccaactattaataagagattcggtgctactttgggtgaattggttggtggtagagttggtttagcttatgcatctgttggtgttttgaagatctcagctacaatcgcaatcagatactctttgttgagacaacaatttggtccaccaaagcaaccagaagtttctatcttggattaccaatcacaacaacataagttgatgccaatgttggcttctacatacgcataccatttcgctactgtttatttggttgaaaagtactcagaaatgaagaaaactcatgatgaacaattagttgcagatgttcatgctttatctgcaggtttgaagtcttacgttacatcatacactgctaaggcattgtcagtttgtagagaagcttgtggtggtcatggttatgctgcagttaatagatttggttctttaagaaacgatcatgatatcttccaaacattcgaaggtgacaacactgttttgttacaacaagttgctgcagatttgttgaagagatacaaggaaaagttccaaggtggtactttgacagttacttggtcttatttgagagaatcaatgaacacatacttgtctcaaccaaatccagttactgcaagatgggaaggtgaagatcatttgagagatccaaagttccaattggatgcttttagatacagaacatctagattgttgcaaaacgttgctgcaagattgcaaaagcattcaaagactttgggtggttttggtgcatggaacagatgtttgaaccatttgttgacattggctgaatctcatatcgaaactgttattttggcaaagtttattgaagctgttaaaaattgtccagatccatcagcaaaagctgcattgaagttggcatgtgatttgtacgctttggatagaatctggaaggatatcggtacatacagaaacgttgattacgttgctccaaataaggctaaggcaatccataagttgactgaatacttgtctttccaagttagaaacgttgcaaaggaattagttgatgctttcgaattgccagatcatgttacaagagctccaattgcaatgcaatctgatgcttattcacaatacactcaagttgttggtttttaa

SEQ ID NO: 171 - protein, 700 aa, Yarrowia lipolytica
MNPNNTGTIEINGKEYNTFTEPPVAMAQERAKTSFPVREMTYFLDGGEKNTLKNEQIMEEIERDPLFNNDNYYDLNKEQIRELTMERVAKLSLFVRDQPEDDIKKRFALIGIADMGTYTRLGVHYGLFFGAVRGTGTAEQFGHWISKGAGDLRKFYGCFSMTELGHGSNLAGLETTAIYDEETDEFIINTPHIAATKWWIGGAAHTATHTVVFARLIVKGKDYGVKTFVVQLRNINDHSLKVGISIGDIGKKMGRDGIDNGWIQFTNVRIPRQNLLMKYTKVDREGNVTQPPLAQLTYGSLITGRVSMASDSHQVGKRFITIALRYACIRRQFSTTPGQPETKIIDYPYHQRRLLPLLAYVYALKMTADEVGALFSRTMLKMDDLKPDDKAGLNEVVSDVKELFSVSAGLKAFSTWACADVIDKTRQACGGHGYSGYNGFGQAYADWVVQCTWEGDNNILTLSAGRALIQSAVALRKGEPVGNAVSYLKRYKDLANAKLNGRSLTDPKVLVEAWEVAAGNIINRATDQYEKLIGEGLNADQAFEVLSQQRFQAAKVHTRRHLIAAFFSRIDTEAGEAIKQPLLNLALLFALWSIEEDSGLFLREGFLEPKDIDTVTELVNKYCTTVREEVIGYTDAFNLSDYFINAPIGCYDGDAYRHYFQKVNEQNPARDPRPPYYASTLKPFLFREEEDDDICELDEE

SEQ ID NO: 172 - DNA, 2103 bp, Yarrowia lipolytica
atgaatccaaataatactggtacaattgaaattaatggtaaagaatacaacacttttacagaaccaccagttgctatggcacaagaaagagctaaaacatctttcccagttagagaaatgacttactttttggatggtggtgaaaagaatacattgaaaaatgaacaaatcatggaagaaatcgaaagagatccattgtttaataacgataactactacgatttgaataaggaacaaattagagaattgactatggaaagagttgctaagttgtctttgttcgttagagatcaaccagaagatgatattaagaaaagattcgctttgattggtattgcagatatgggtacttatacaagattaggtgttcattacggtttgtttttcggtgctgttagaggtactggtacagcagaacaatttggtcattggatttcaaaaggtgctggtgacttgagaaagttctacggttgtttctctatgacagaattgggtcatggttcaaatttggctggtttagaaactacagcaatctatgatgaagaaactgatgaattcattattaatacaccacatattgctgcaactaaatggtggattggtggtgctgcacatactgctacacatactgttgttttcgcaagattgatcgttaagggtaaagattacggtgttaagacattcgttgttcaattgagaaacattaatgatcattctttgaaagttggtatctcaatcggtgacatcggtaaaaagatgggtagagatggtatcgataacggttggattcaattcactaacgttagaattccaagacaaaatttgttgatgaagtacacaaaggttgatagagagggtaacgttactcaaccaccattggctcaattgacatacggttctttaatcactggtagagtttcaatggcatctgattcacatcaagttggtaaaagattcattacaatcgctttgagatacgcatgtatcagaagacaattttctactacaccaggtcaaccagaaactaagatcatcgattacccataccatcaaagaagattgttgccattgttggcttacgtttacgcattgaagatgacagctgatgaagttggtgcattgttttcaagaactatgttgaagatggatgatttgaagccagatgataaggctggtttgaatgaagttgtttctgatgttaaggaattattttctgtttcagctggtttgaaagcattttcaacatgggcttgtgcagatgttattgataaaactagacaagcttgtggtggtcatggttattctggttacaatggttttggtcaagcttacgcagattgggttgttcaatgtacatgggaaggtgacaacaacatcttgactttgtctgctggtagagcattaattcaatcagctgttgcattgagaaaaggtgaaccagttggtaacgctgtttcttatttgaagagatacaaggatttggctaacgcaaagttgaacggtagatcattgacagatccaaaagttttggttgaagcttgggaagttgctgctggtaacattattaacagagcaactgatcaatatgaaaaattaattggtgaaggtttgaatgctgatcaagcattcgaagttttgtctcaacaaagattccaagctgcaaaagttcatacaagaagacatttgattgctgctttcttttctagaattgatactgaagctggtgaagcaattaaacaaccattgttgaatttggctttgttgttcgcattgtggtctatcgaagaagattcaggtttgtttttaagagaaggtttcttggaaccaaaggatatcgatacagttactgaattggttaataagtactgtactacagttagagaagaagttattggttacactgatgcttttaatttgtctgattacttcatcaacgctccaatcggttgttacgatggtgacgcatacagacattacttccaaaaggttaacgaacaaaacccagctagagatccaagaccaccatactacgcatcaactttgaagccatttttgtttagagaagaagaagatgatgatatctgtgaattggatgaagaataa

SEQ ID NO: 173 - protein, 724 aa, Candida tropicalis
MAMLSQPNDGHDHPEKKDPDTTPKQVAGVISSQDPPHPAKDVAEERARTDWDLKEMHEFLEGDEAKSEQILRLYQSIERDPILQTRPEQFDYTQKQERELVANRINQMTKFLETEPYGKFRRRLQLMTVIDPSLGIRMLVNIGLFLNCVRGNGTQKQFDFWSNKKEAGIVKQLYGCFGMTELGHGSNVAGCETTATFDEKTDEFIIDTPHIGATKWWIGGAAHSATHTVCYARLIVKDVDYGVKTFIVPLRDSRHSLLPGIAIGDIGAKMGRQGVDNGWIQFTEVRVPRFFMLQRWCKVDRQGNVTLPPLEQLSYISLLEGRVGMATDSYRIGARYTTIALRYAVGRRQFSKKAGEPETKLIDYTLHQRRLLPYLALTYAAAVGTDRLERQHEELLANLDIALAKKDKLLLKNTITGTKSMFVDSGSLKSTLTWLAADLINETRQACGGHGYSSYNGFGKTYDDWVVQCTWEGDNNVLAMSAGKTIIKTVQQVLNGKELKDSTLEFLNAAPELSKAKKAVIRIRDHVDDVDRVLKAIAGLISKFSKDLIPISYQSWDSIGAQRVILSKLRCHYYLLETFNERLNDKIKAKSPARPHLENIIKLYYVTNILGPFIDEFLRFGVISPQVAKYITYEYPQKLCANIRPYVIGLTDSFQQPDNFINSLIGKYDGNIYTNYLESVKDVNDPSNYKAPYSEALEAMLNRSALENRERSERGKAAADILSK

SEQ ID NO: 174 - DNA, 2175 bp, Candida tropicalis
atggcaatgttgtctcaaccaaatgatggtcatgatcatccagaaaagaaagatccagatactacaccaaaacaagttgctggtgttatttcttcacaagatccaccacatccagctaaagatgttgcagaagaaagagctagaactgattgggatttgaaggaaatgcatgaattcttggaaggtgacgaagcaaaatcagaacaaatcttgagattgtaccaatctatcgaaagagatccaatcttgcaaacaagaccagaacaattcgattacactcaaaagcaagaaagagaattggttgctaacagaattaatcaaatgacaaagttcttggaaactgaaccatacggtaaattcagaagaagattgcaattgatgacagttattgatccatcattgggtattagaatgttggttaacatcggtttatttttgaattgtgttcgtggtaacggtactcaaaagcaattcgatttctggtcaaataagaaagaagctggtatcgttaagcaattgtacggttgttttggtatgacagaattaggtcatggttctaatgttgcaggttgtgaaactacagctacattcgatgaaaagactgatgaattcattatcgatacaccacatattggtgctactaaatggtggattggtggtgctgcacattctgcaactcatacagtttgttacgctagattgatcgttaaggatgttgattacggtgttaagacttttattgttccattgagagattctagacattcattgttaccaggtattgcaattggtgacattggtgctaaaatgggtagacaaggtgttgataatggttggattcaattcactgaagttagagttccaagatttttcatgttgcaaagatggtgtaaggttgatagacagggtaacgttacattaccaccattggaacaattgtcttacatctcattgttagaaggtagagttggtatggcaactgattcatatagaattggtgctagatacactacaattgcattgagatatgctgttggtagaagacaattttctaagaaagctggtgaaccagaaacaaagttgatcgattacactttgcatcaaagaagattgttgccatatttggcattgacatacgctgcagctgttggtactgatagattggaaagacaacatgaagaattgttggctaatttggatatcgctttagctaagaaagacaagttgttgttgaaaaatactatcacaggtactaagtcaatgttcgttgattctggttcattgaaatctacattgacttggttagcagctgatttgattaatgaaactagacaagcttgtggtggtcatggttactcttcatacaacggtttcggtaaaacatacgatgattgggttgttcaatgtacttgggaaggtgacaataatgttttggctatgtctgcaggtaaaacaattattaagactgttcaacaagttttgaatggtaaagaattgaaggattcaacattggaattcttgaacgcagctccagaattgtctaaggctaagaaagcagttattagaattagagatcatgttgatgatgttgatagagttttgaaagctattgcaggtttaatctctaaattttcaaaggatttgattccaatttcttaccaatcatgggattctattggtgctcaaagagttattttgtcaaaattaagatgtcattattacttattagaaacttttaatgaaagattgaacgataagattaaagcaaaatctccagctagaccacatttggaaaacattattaagttgtactacgttacaaacatcttgggtccttttattgatgaattcttgagattcggtgttatttctccacaagttgcaaagtacatcacatacgaatacccacaaaagttgtgtgctaacatcagaccatacgttatcggtttaactgattcattccaacaaccagataacttcatcaactctttgatcggtaaatatgatggtaatatctatactaattacttagaatcagttaaggatgttaacgatccatcaaactacaaggcaccatactctgaagctttggaagcaatgttgaacagatcagctttggaaaacagagaaagatctgaacgtggtaaagcagctgcagatattttatctaaataa

SEQ ID NO: 175 - protein, 748 aa, Saccharomyces cerevisiae
MTRRTTINPDSVVLNPQKFIQKERADSKIKVDQVNTFLESSPERRTLTHALIDQIVNDPILKTDTDYYDAKKMQEREITAKKIARLASYMEHDIKTVRKHFRDTDLMKELQANDPDKASPLTNKDLFIFDKRLSLVANIDPQLGTRVGVHLGLFGNCIKGNGTDEQIRYWLQERGATLMKGIYGCFAMTELGHGSNVAQLQTRAVYDKQNDTFVIDTPDLTATKWWIGGAAHSATHAAVYARLIVEGKDYGVKTFVVPLRDPSTFQLLAGVSIGDIGAKMGRDGIDNGWIQFRNVVIPREFMLSRFTKVVRSPDGSVTVKTEPQLDQISGYSALLSGRVNMVMDSFRFGSKFATIAVRYAVGRQQFAPRKGLSETQLIDYPLHQYRVLPQLCVPYLVSPVAFKLMDNYYSTLDELYNASSSAYKAALVTVSKKLKNLFIDSASLKATNTWLIATLIDELRQTCGGHGYSQYNGFGKGYDDWVVQCTWEGDNNVLSLTSAKSILKKFIDSATKGRFDNTLDVDSFSYLKPQYIGSVVSGEIKSGLKELGDYTEIWSITLIKLLAHIGTLVEKSRSIDSVSKLLVLVSKFHALRCMLKTYYDKLNSRDSHISDEITKESMWNVYKLFSLYFIDKHSGEFQQFKIFTPDQISKVVQPQLLALLPIVRKDCIGLTDSFELPDAMLNSPIGYFDGDIYHNYFNEVCRNNPVEADGAGKPSYHALLSSMLGRGFEFDQKLGGAANAEILSKINK

SEQ ID NO: 176 - DNA, 2247 bp, Saccharomyces cerevisiae
atgacgagacgtactactattaatcccgattcggtggttctgaatcctcaaaaatttatccagaaagaaagggcggattcgaaaatcaaagttgaccaagttaacacatttttagagtcatccccggagaggagaactctgacgcacgccttaatagaccaaatagtgaatgatcctatattgaaaactgatacggactattacgatgctaaaaaaatgcaagagagagaaattactgccaaaaaaatagctaggcttgctagttatatggagcacgatatcaaaacagtgcgcaaacactttcgcgacactgacctgatgaaagagttgcaagcaaatgatccagacaaagcttcgcctttaacaaacaaagacctttttatattcgataagagattgtcacttgtagcaaatattgatcctcaattgggtacgcgcgtgggtgtacacttggggctatttggtaattgtatcaagggcaatggtactgatgagcaaatccggtattggttgcaggagagaggtgccactttgatgaaaggtatatatggctgttttgcaatgactgagttaggacatggttccaatgttgcccagctgcagactagggctgtgtacgataagcaaaatgatacttttgtaattgatacacctgatctaactgccaccaaatggtggattggtggggctgcccattctgccacgcacgctgccgtgtacgccagattgatcgttgaaggtaaagactacggtgtaaaaacattcgttgttcctctgagagacccttcgactttccaactgttagctggtgtttccataggggatattggagcgaagatgggtcgtgacggtattgataatggctggatccagttcagaaacgtagttatccctagagaatttatgctaagtagatttaccaaagttgtccgttctccagatggttcagtcaccgtcaaaactgagccacaattggatcaaatttctggttatagtgcattgttaagtggtagagttaacatggtcatggattcatttaggtttggctccaaatttgctactattgctgtacgttacgcggttggtcgtcagcaattcgcacctagaaagggattgtctgaaacacaattaatcgactatccccttcaccaatatcgtgttttaccacaattgtgtgttccatatttggtgtcacctgtagcttttaagttaatggacaactattattccactttggacgagttatacaacgcttcctcatctgcatacaaagctgctctggttaccgtgagtaaaaagttgaagaatttatttattgatagcgccagcttgaaagccaccaatacttggttaattgctacactgattgatgagttgagacagacttgcggaggacatgggtattcacagtataacggatttggtaaaggctatgacgactgggtggttcagtgcacatgggagggtgataataatgttttatctttaacttcagcaaaatcaatattgaaaaaatttatcgattcagccacaaagggtagatttgacaacacactggatgtggactcattctcttacttaaaacctcagtacataggatctgtggtttctggagaaataaagagtggtttaaaggagttgggtgattatactgaaatttggtctatcaccttaatcaaattactggcacatattggtactttagttgaaaaatcaagaagtattgatagcgtttctaagcttttagtcttagtatccaaatttcatgccttgcgctgcatgttgaaaacctattacgacaagttaaactctcgtgattcacatatttccgatgaaattacaaaggaatctatgtggaatgtttataagttattttccttgtattttattgacaagcattccggagaattccaacaattcaagatcttcactcctgatcagatctctaaagttgtgcagccacaactattggctcttttgccaattgtgaggaaagactgtataggtctgacagactcctttgaattacctgacgcgatgttaaattctcctataggttactttgatggcgatatctatcacaattacttcaatgaagtttgccgcaataatccagtggaggcagatggggcagggaagccttcttatcatgcgctgttgagcagcatgctcggtagaggtttcgaatttgaccaaaagttaggtggtgcagctaatgcggaaattttatcgaaaataaacaagtga

SEQ ID NO: 177 - protein, 736 aa, Homo sapiens
MGSPLRFDGRVVLVTGAGAGLGRAYALAFAERGALVVVNDLGGDFKGVGKGSLAADKVVEEIRRRGGKAVANYDSVEEGEKVVKTALDAFGRIDVVVNNAGILRDRSFARISDEDWDIIHRVHLRGSFQVTRAAWEHMKKQKYGRIIMTSSASGIYGNFGQANYSAAKLGLLGLANSLAIEGRKSNIHCNTIAPNAGSRMTQTVMPEDLVEALKPEYVAPLVLWLCHESCEENGGLFEVGAGWIGKLRWERTLGAIVRQKNHPMTPEAVKANWKKICDFENASKPQSIQESTGSIIEVLSKIDSEGGVSANHTSRATSTATSGFAGAIGQKLPPFSYAYTELEAIMYALGVGASIKDPKDLKFIYEGSSDFSCLPTFGVIIGQKSMMGGGLAEIPGLSINFAKVLHGEQYLELYKPLPRAGKLKCEAVVADVLDKGSGVVIIMDVYSYSEKELICHNQFSLFLVGSGGFGGKRTSDKVKVAVAIPNRPPDAVLTDTTSLNQAALYRLSGDWNPLHIDPNFASLAGFDKPILHGLCTFGFSARRVLQQFADNDVSRFKAIKARFAKPVYPGQTLQTEMWKEGNRIHFQTKVQETGDIVISNAYVDLAPTSGTSAKTPSEGGKLQSTFVFEEIGRRLKDIGPEVVKKVNAVFEWHITKGGNIGAKWTIDLKSGSGKVYQGPAKGAADTTIILSDEDFMEVVLGKLDPQKAFFSGRLKARGNIMLSQKLQMILKDYAKL

SEQ ID NO: 178 - DNA, 2211 bp, Homo sapiens
atgggttctccattgagatttgatggtagagttgttttagttacaggtgctggtgcaggtttgggtagagcttatgcattagcttttgcagaaagaggtgctttggttgttgttaatgatttgggtggtgactttaaaggtgttggtaaaggttctttggctgcagataaggttgttgaagaaatcagaagaagaggtggtaaagctgttgcaaattacgattcagttgaagaaggtgaaaaagttgttaaaactgctttggatgcattcggtagaatcgatgttgttgttaacaacgcaggtattttaagagatagatcattcgctagaatctctgatgaagattgggatatcatccatagagttcatttgagaggttcttttcaagttacaagagctgcatgggaacatatgaagaaacaaaagtacggtagaatcattatgacttcttcagcatcaggtatctatggtaacttcggtcaagctaactactctgctgcaaagttgggtttgttgggtttagcaaactcattggctatcgaaggtagaaagtctaacatccattgtaacacaattgctccaaatgcaggttctagaatgactcaaacagttatgccagaagatttggttgaagcattgaaaccagaatacgttgctccattggttttatggttgtgtcatgaatcatgtgaagaaaatggtggtttgtttgaagttggtgcaggttggattggtaaattgagatgggaaagaacattaggtgctattgttagacaaaagaatcatccaatgactccagaagctgttaaggcaaactggaagaaaatttgtgatttcgaaaacgcttctaagccacaatcaatccaagaatctacaggttcaatcatcgaagttttgtctaagatcgattcagaaggtggtgtttctgctaatcatacttctagagcaacttcaacagctacttctggttttgctggtgcaatcggtcaaaagttaccaccattttcttacgcatacacagaattggaagcaattatgtatgctttaggtgttggtgcttcaattaaagatccaaaggatttgaagtttatatatgaaggttcttcagatttctcatgtttgccaactttcggtgttattatcggtcaaaaatctatgatgggtggtggtttggcagaaattccaggtttatcaattaatttcgctaaggttttgcatggtgaacaatatttggaattgtacaagccattgccaagagctggtaaattaaaatgtgaagctgttgttgcagatgttttggataaaggttctggtgttgttattattatggatgtttattcttactcagaaaaggaattgatctgtcataaccaattttcattatttttggttggttctggtggtttcggtggtaaaagaacatcagataaggttaaggttgctgttgcaattccaaatagaccaccagatgctgttttgactgatactacatcattgaaccaagctgcattgtacagattgtctggtgactggaatccattgcatatcgatccaaacttcgcttctttggcaggtttcgataagccaatcttgcatggtttgtgtactttcggtttttctgcaagaagagttttgcaacaattcgctgataacgatgtttcaagattcaaagctattaaagcaagattcgctaagccagtttatccaggtcaaacattacaaactgaaatgtggaaggagggtaacagaattcatttccaaacaaaggttcaagaaactggtgacatcgttatctcaaacgcatacgttgatttggctccaacatctggtacttcagctaaaacaccatcagaaggtggtaaattgcaatctactttcgttttcgaagaaatcggtagaagattgaaggatatcggtccagaagttgttaagaaagttaacgcagttttcgaatggcatatcacaaaaggtggtaacatcggtgctaagtggactatcgatttgaaatctggttcaggtaaagtttatcaaggtccagctaaaggtgctgcagatactacaatcatcttgtctgatgaagatttcatggaagttgttttgggtaaattagatccacaaaaggctttcttttctggtagattgaaggctcgtggtaacatcatgttatctcaaaaattgcaaatgattttaaaagattacgctaaattataa

SEQ ID NO: 179 - protein, 735 aa, Mus musculus
MASPLRFDGRVVLVTGAGGGLGRAYALAFAERGALVIVNDLGGDFKGIGKGSSAADKVVAEIRRKGGKAVANYDSVEAGEKLVKTALDTFGRIDVVVNNAGILRDRSFSRISDEDWDIIHRVHLRGSFQVTRAAWDHMKKQNYGRILMTSSASGIYGNFGQANYSAAKLGILGLCNTLAIEGRKNNIHCNTIAPNAGSRMTETVLPEDLVEALKPEYVAPLVLWLCHESCEENGGLFEVGAGWIGKLRWERTLGAIVRKRNQPMTPEAVRDNWEKICDFSNASKPQTIQESTGGIVEVLHKVDSEGISPNRTSHAAPAATSGFVGAVGHKLPSFSSSYTELQSIMYALGVGASVKNPKDLKFVYEGSADFSCLPTFGVIVAQKSMMNGGLAEVPGLSFNFAKALHGEQYLELYKPLPRSGELKCEAVIADILDKGSGVVIVMDVYSYSGKELICYNQFSVFVVGSGGFGGKRTSEKLKAAVAVPNRPPDAVLRDATSLNQAALYRLSGDWNPLHIDPDFASVAGFEKPILHGLCTFGFSARHVLQQFADNDVSRFKAIKVRFAKPVYPGQTLQTEMWKEGNRIHFQTKVHETGDVVISNAYVDLVPASGVSTQTPSEGGELQSALVFGEIGRRLKSVGREVVKKANAVFEWHITKGGTVAAKWTIDLKSGSGEVYQGPAKGSADVTIIISDEDFMEVVFGKLDPQKAFFSGRLKARGNIMLSQKLQMILKDYAKL

SEQ ID NO: 180 - DNA, 2208 bp, Mus musculus
atggcttctccattaagatttgatggtagagttgttttggttactggtgctggtggtggtttgggtagagcttatgcattggcttttgcagaaagaggtgctttagttattgttaacgatttgggtggtgactttaaaggtattggtaaaggttcttcagctgcagataaggttgttgcagaaatcagaagaaaaggtggtaaagctgttgcaaattacgattctgttgaagctggtgaaaaattagttaagactgcattggatacattcggtagaatcgatgttgttgttaacaacgctggtattttaagagatagatcattttctagaatctctgatgaagattgggatatcatccatagagttcatttgagaggttcatttcaagttactagagctgcatgggatcatatgaagaaacaaaactacggtagaattttaatgacatcttcagcttctggtatctatggtaacttcggtcaagcaaactactcagctgcaaagttgggtattttgggtttatgtaacactttggctatcgaaggtagaaagaataacatccattgtaacacaattgctccaaatgcaggttctagaatgactgaaacagttttaccagaagatttggttgaagctttaaaaccagaatacgttgcaccattggttttatggttgtgtcatgaatcatgtgaagaaaacggtggtttgtttgaagttggtgctggttggattggtaaattaagatgggaaagaactttgggtgctatcgttagaaagagaaaccaaccaatgacaccagaagcagttagagataactgggaaaagatttgtgatttctcaaacgcttctaagccacaaactattcaagaatctacaggtggtatcgttgaagttttgcataaggttgattcagaaggtatctctccaaatagaacttcacatgctgcaccagctgcaacatctggttttgttggtgctgttggtcataagttgccatcattttcttcatcttacactgaattgcaatctatcatgtacgctttgggtgttggtgcatcagttaaaaatccaaaggatttgaagttcgtttacgaaggttcagctgatttctcttgtttgccaacattcggtgttattgttgctcaaaaatctatgatgaatggtggtttagcagaagttccaggtttgtcttttaatttcgctaaggcattgcatggtgaacaatatttggaattgtacaagccattgccaagatctggtgaattgaagtgtgaagctgttattgcagatatcttggataagggttcaggtgttgttattgttatggatgtttactcatactctggtaaagaattgatctgttacaaccaattttcagtttttgttgttggttctggtggtttcggtggtaaaagaacttctgaaaagttaaaagctgcagttgctgttccaaatagaccaccagatgctgttttaagagatgcaacatctttgaatcaagctgcattatacagattgtctggtgactggaatccattgcatattgatccagattttgcttctgttgcaggtttcgaaaagccaatcttgcatggtttgtgtacattcggtttttctgctagacatgttttgcaacaattcgcagataacgatgtttcaagattcaaagctattaaagttagattcgcaaagccagtttatccaggtcaaactttgcaaacagaaatgtggaaggagggtaacagaattcatttccaaactaaggttcatgaaacaggtgacgttgttatttctaatgcttacgttgatttggttccagcatcaggtgtttctactcaaacaccatcagaaggtggtgaattgcaatctgctttagttttcggtgaaatcggtagaagattgaagtcagttggtagagaagttgttaagaaagctaacgcagttttcgaatggcatatcactaaaggtggtacagttgctgcaaaatggactattgatttgaaatcaggttctggtgaagtttatcaaggtccagctaagggttcagcagatgttacaatcatcatctctgatgaagatttcatggaagttgttttcggtaaattagatccacaaaaggctttcttttctggtagattgaaggcacgtggtaacatcatgttgtcacaaaaattacaaatgattttgaaagattacgctaaattgtaa

SEQ ID NO: 181 - protein, 751 aa, Rattus norvegicus
MASPLRFDGRVVLVTGAGGGLGRAYALAFAERGALVVVNDLGGDFKGVGKGSSAADKVVEEIRRRGGKAVANYDSVEAGEKLVKTALDTFGRIDVVVNNAGILRDRSFSRISDEDWDIIQRVHLRGSFQVTRAAWDHMKKQNYGRIIMTASASGIYGNFGQANYSAAKLGLLGLANTLVIEGRKNNIHCNTIAPNAGSRMTETVMPEDLVEALKPEYVAPLVLWLCHESCEENGGLFEVGAGWIGKLRWERTLGAIVRKRNQPMTPEAVRDNWVKICDFSNASKPKSIQESTGGIIEVLHKIDSEGISQNHTGQVASADASGFAGVVGHKLPSFSSSYTELQCIMYALGVGASVKNPKDLKFVYEGSADFSCLPTFGVIVAQKSLMSGGLAEVPGLSINFAKVLHGEQYLELYKPLPRSGELKCEAVIADILDKGSGIVIVMDVYSYSGKELICYNQFSVFVVGSGGFGGKRTSEKLKAAVAVPSRPPDAVLRDTTSLNQAALYRLSGDSNPLHIDPSFASIAGFEKPILHGLCTFGFSARHVLQQFADNDVSRFKAIKVRFAKPVYPGQTLQTEMWKEGNRIHFQTKVQETGDIVISNAYVDLVPTSGVSAQTPSEGGALQSALVFGEIGRRLKDVGREVVKKVNAVFEWHITKNGNVAAKWMELTISFSVSSLLPANAIDLKNGSGEVYQGPAKGSADTTITISDEDFMEVVLGKLNPQNAFFSGRLKARGNIMLSQKLQMILKDYAKL

SEQ ID NO: 182 - DNA, 2256 bp, Rattus norvegicus
atggcttcaccattgagatttgatggtagagttgttttagttactggtgctggtggtggtttgggtagagcttatgcattagcttttgcagaaagaggtgctttggttgttgttaatgatttgggtggtgactttaaaggtgttggtaaaggttcttcagctgcagataaggttgttgaagaaatcagaagaagaggtggtaaagctgttgcaaattacgattctgttgaagcaggtgaaaaattggttaagactgctttggatacattcggtagaatcgatgttgttgttaacaacgctggtattttgagagatagatcattttctagaatctcagatgaagattgggatatcatccaaagagttcatttgagaggttcttttcaagttactagagctgcatgggatcatatgaagaaacaaaactacggtagaatcattatgacagcttcagcatctggtatctatggtaacttcggtcaagctaactactctgctgcaaaattgggtttgttgggtttagcaaacactttggttattgaaggtagaaagaataacatccattgtaacacaattgcaccaaatgctggttcaagaatgactgaaacagttatgccagaagatttggttgaagcattgaaaccagaatacgttgctccattggttttatggttgtgtcatgaatcttgtgaagaaaacggtggtttatttgaagttggtgctggttggattggtaaattgagatgggaaagaactttgggtgctatcgttagaaagagaaaccaaccaatgacaccagaagcagttagagataactgggttaagatctgtgatttctcaaacgcttctaagccaaagtcaatccaagaatctactggtggtatcatcgaagttttgcataagatcgattcagaaggtatctctcaaaatcatacaggtcaagttgcttcagcagatgcttctggttttgctggtgttgttggtcataagttgccatcattttcttcatcttacactgaattgcaatgtatcatgtacgcattaggtgttggtgcttctgttaaaaatccaaaggatttgaagttcgtttacgaaggttcagctgatttctcttgtttgccaacattcggtgttattgttgcacaaaaatcattgatgtctggtggtttagctgaagttccaggtttgtctattaatttcgcaaaggttttgcatggtgaacaatatttggaattgtacaagccattgccaagatctggtgaattgaagtgtgaagcagttattgctgatatcttggataagggttctggtatcgttatcgttatggatgtttactcatactctggtaaagaattgatctgttacaaccaattttcagttttcgttgttggttctggtggtttcggtggtaaaagaacttcagaaaagttgaaagctgcagttgcagttccatctagaccaccagatgctgttttgagagatactacatctttgaaccaagctgcattgtacagattgtctggtgactctaacccattgcatatcgatccatcattcgcatctatcgctggtttcgaaaagccaatcttgcatggtttgtgtacattcggtttttcagcaagacatgttttgcaacaattcgctgataacgatgtttctagattcaaagcaattaaagttagattcgctaagccagtttatccaggtcaaactttacaaacagaaatgtggaaggagggtaacagaattcatttccaaactaaggttcaagaaacaggtgacatcgttatctctaacgcttacgttgatttggttccaacttcaggtgtttctgcacaaacaccatcagaaggtggtgcattacaatctgctttggttttcggtgaaatcggtagaagattgaaggatgttggtagagaagttgttaagaaagttaacgctgttttcgaatggcatatcactaaaaatggtaacgttgctgcaaagtggatggaattgacaatctcattttctgtttcatctttgttgccagcaaacgctatcgatttgaaaaatggttctggtgaagtttatcaaggtccagcaaaaggttcagctgatactacaatcacaatctctgatgaagatttcatggaagttgttttgggtaaattgaacccacaaaacgctttcttttctggtagattgaaggctcgtggtaacatcatgttatctcaaaaattgcaaatgattttaaaagattacgctaaattataa

SEQ ID NO: 183 - protein, 736 aa, Bos taurus
MASTLRFNGRVVLVTGAGGGLGRAYALAFAERGASVVVNDLGGDFTGVGKGSLAADKVVEEIRRKGGKAVANYDSVEEGEKIVKTALDAFGRIDIVINNAGILRDRSFSRISDEDWDKIQRVHLRGSFLVTRAAWDHMKKQKFGRIIMTSSASGIYGNFGQANYCAAKLGLLGLSNCLAVEGKKNNIHCNTIAPTAGSRMTQSILPEDLVEALKPDYVAPLVLWLCHESCEENGGLFEVGAGWIGKLRWERSLGALVRQRTQPMTPEAVKANWTKICDFDNATKPKSIQESIGSIVEALNKINSGGEVSANPTSRATSATTSEFARAIGHKFPPLYSSYAELDTIMYALGVGASIKEPKDMKFIYEGSSDFSCLPTFGVILAQKSIMNGGLAEIPGLSINLAKILHGEQYLELHKPIPRAGKLRCEAIVADILDKGSGLVILVDVYTYSGEELICYNQFSIFVVGSGGSGGKRTSDKAKAAVAIPNRPPDAVLTDTTSLNQAALYRLSGDWNPLHIDPNFASLAGFDKPILHGLCTFGFSARHVLQQFADNDVSRFKAIKVRFAKPVYPGQTLQTEMWKEGNRIHFQTKVQETGGIVISNAYVDLVPASAISAKTPSEGAGLQSTLVFEEIGRRLQGIGEEVVKKVRAVFEWHITKGENTAAKWTIDLKTGSGKVYQGPAKGSADVTITLSDEDFMEVVLGKLDPQKAVFSGRLKARGNILLSQKLQMILKDYAKL

SEQ ID NO: 184 - DNA, 2211 bp, Bos taurus
atggcatctactttgagattcaatggtagagttgttttagttacaggtgctggtggtggtttgggtagagcttatgcattggcttttgcagaaagaggtgcttctgttgttgttaatgatttgggtggtgactttactggtgttggtaaaggttcattagctgcagataaggttgttgaagaaatcagaagaaaaggtggtaaagctgttgcaaattacgattctgttgaagaaggtgaaaagattgttaaaacagctttggatgcattcggtagaatcgatatcgttattaataatgctggtattttaagagatagatctttttcaagaatctctgatgaagattgggataagatccaaagagttcatttgagaggttcatttttggttactagagctgcatgggatcatatgaagaaacaaaagttcggtagaatcattatgacatcttcagcttctggtatctatggtaacttcggtcaagcaaactactgtgctgcaaagttgggtttgttgggtttatcaaactgtttggctgttgaaggtaaaaagaataacatccattgtaacactattgctccaacagcaggttcaagaatgactcaatctatcttgccagaagatttggttgaagctttaaaaccagattatgttgcaccattggttttatggttgtgtcatgaatcttgtgaagaaaacggtggtttgtttgaagttggtgcaggttggatcggtaaattgagatgggaaagatcattaggtgctttggttagacaaagaactcaaccaatgacaccagaagctgttaaggcaaactggactaagatctgtgatttcgataatgctacaaagccaaagtctatccaagaatctatcggttcaatcgttgaagcattgaataagattaattcaggtggtgaagtttctgctaatccaacttctagagctacatcagcaactacatctgaatttgctagagcaatcggtcataagtttccaccattatactcttcatacgctgaattggatactattatgtatgctttaggtgttggtgcatcaattaaagaaccaaaggatatgaagtttatatatgaaggttcttcagatttttcatgtttgccaacatttggtgttattttggctcaaaaatctatcatgaatggtggtttggcagaaattccaggtttgtctattaatttggctaagatcttgcatggtgaacaatatttggaattgcataagccaatcccaagagctggtaaattgagatgtgaagctatcgttgcagatatcttggataagggttctggtttagttattttggttgatgtttacacttactcaggtgaagaattgatctgttacaaccaattttctatctttgttgttggttctggtggttcaggtggtaaaagaacttcagataaagctaaagctgcagttgcaattccaaatagaccaccagatgctgttttgacagatactacatcattgaaccaagctgcattgtacagattgtctggtgactggaatccattgcatatcgatccaaacttcgcttctttggcaggtttcgataagccaatcttgcatggtttgtgtacattcggtttttctgctagacatgttttgcaacaattcgcagataacgatgtttcaagattcaaagctattaaagttagattcgcaaagccagtttatccaggtcaaactttacaaacagaaatgtggaaggagggtaacagaattcatttccaaactaaggttcaagaaacaggtggtatcgttatctctaacgcatacgttgatttggttccagcttctgcaatttcagctaaaactccatcagaaggtgcaggtttacaatctacattggttttcgaagaaatcggtagaagattgcaaggtattggtgaagaagttgttaagaaagttagagctgttttcgaatggcatatcactaagggtgaaaatacagctgcaaaatggactattgatttgaaaacaggttctggtaaagtttatcaaggtccagctaaaggttcagcagatgttactatcacattgtctgatgaagatttcatggaagttgttttgggtaaattagatccacaaaaagctgttttctctggtagattgaaggcacgtggtaacatcttgttatctcaaaaattacaaatgattttgaaagattacgctaaattataa

SEQ ID NO: 185 - protein, 736 aa, Sarcophilus harrisii
MDGQLRFDGRVVLVTGAGGGLGRAYALAFAERGASVVVNDLGGDFKGAGKSSSPANNVVEEIRKKGGKAVANYDSVEAGEKVVKTALEAFGKIDIVINNAGILRDRSFVRISDEDWDVIHKVHLRGSFQVTRAAWDHMKKQKFGRIIMTSSASGIYGNFGQANYSAAKLGLLGLSNTLAIEGRKFNIHCNTIAPTAGSRMTKTILPPDLLDSLKPDYVAPLVLWLCHESCEENGGLFEVGAGWIGKLRWERTLGAIVRQKNQPMTPEAVKANWRKICDFDNASKPQTIQESTAGVIEVLSKIDSQGEISMNHTSHAASATTSDFTRAIGYKLPQRTFSYTELEAIMYALGVGASVKHPENLKFVYEGSSDFSCLPTFGVIPAQKCMMEGGLSEVPGLNIDFAKVLHGEQYLELYKPLPRTGQLTNESIIVDILDKGSGLVILLDVYSYSGKELICFNQFSVFVVGSGGFGGKKTSNKAKVTVPPPKRSPDAVLVDTTSLNQAVLYRLSGDWNPLHIDPSFASLGGFDKPILHGLCSFGFSARHVLQQFGNNDVSRFKAIKARFAKPVYPGQTLLTEMWKEGNRIHFQTKVQETGDIVLSNAYVDLVPTSDFSATVSSKDGVLQSTLVFEEIGRRIKDLGKELVKKVNAVFEWNITKQGQTAAQWTIDLKNGSGELYQGPARGSADTAFTLSDEDFMEVVLGKLNPQKAFFSGKLRVKGNIMLSQKLEMILKDYAKL

SEQ ID NO: 186 - DNA, 2211 bp, Sarcophilus harrisii
atggatggtcaattgagatttgatggtagagttgttttagttacaggtgctggtggtggtttgggtagagcttatgcattagcttttgcagaaagaggtgcttcagttgttgttaatgatttgggtggtgactttaaaggtgctggtaaatcttcatctccagctaacaacgttgttgaagaaatcagaaagaaaggtggtaaagctgttgcaaattacgattctgttgaagcaggtgaaaaagttgttaaaactgctttggaagcattcggtaaaatcgatatcgttattaataatgctggtattttaagagatagatctttcgttagaatctcagatgaagattgggatgttatccataaggttcatttgagaggttcatttcaagttacaagagctgcatgggatcatatgaagaaacaaaagttcggtagaatcattatgacttcatctgcatctggtatctatggtaacttcggtcaagctaactactctgctgcaaagttgggtttgttgggtttatcaaacactttggctatcgaaggtagaaagtttaatatccattgtaacactattgctccaacagcaggttcaagaatgactaaaacaattttgccaccagatttgttggattctttgaagccagattacgttgctccattggttttatggttgtgtcatgaatcttgtgaagaaaatggtggtttatttgaagttggtgcaggttggattggtaaattgagatgggaaagaacattaggtgctattgttagacaaaagaatcaaccaatgactccagaagctgttaaggcaaactggagaaagatctgtgatttcgataacgcatctaagccacaaactattcaagaatcaacagctggtgttattgaagttttgtcaaagatcgattctcaaggtgaaatctctatgaaccatacatcacatgctgcatctgcaactacatcagatttcactagagctatcggttacaagttgccacaaagaactttttcatacacagaattggaagcaatcatgtacgctttaggtgttggtgcttctgttaagcatccagaaaatttgaagttcgtttacgaaggttcatctgatttctcatgtttgccaactttcggtgttattccagcacaaaaatgtatgatggaaggtggtttgtctgaagttccaggtttaaacatcgatttcgctaaggttttgcatggtgaacaatatttggaattgtacaagccattgccaagaactggtcaattgacaaacgaatctatcatcgttgatatcttggataagggttcaggtttagttattttgttggatgtttactcatactctggtaaagaattgatctgtttcaaccaattttctgtttttgttgttggttcaggtggtttcggtggtaaaaagacttctaataaggctaaggttactgttccaccaccaaaaagatctccagatgcagttttggttgatactacatcattgaaccaagctgtcttgtacagattgtctggtgactggaatccattgcatattgatccatcatttgcatctttaggtggtttcgataagccaatcttgcatggtttgtgttctttcggtttttcagctagacatgttttgcaacaattcggtaacaacgatgtttctagattcaaagctattaaagcaagattcgctaagccagtttatccaggtcaaactttgttaacagaaatgtggaaggagggtaacagaattcatttccaaactaaggttcaagaaacaggtgacattgttttgtcaaatgcatacgttgatttggttccaacatcagatttttctgctactgtttcatctaaggatggtgttttgcaatctactttggttttcgaagaaatcggtagaagaattaaagatttgggtaaagaattggttaagaaagttaacgctgttttcgaatggaacatcactaaacaaggtcaaacagctgcacaatggactatcgatttgaaaaatggttctggtgaattatatcaaggtccagctagaggttctgcagatactgcttttacattgtcagatgaagatttcatggaagttgttttgggtaaattgaacccacaaaaggctttcttttctggtaaattgagagttaaaggtaatattatgttatctcaaaaattggaaatgattttaaaagattacgctaaattataa

SEQ ID NO: 187 - protein, 725 aa, Danio rerio
MSVPLRFDGKVVLVTGAGGGLGREYALAFGQRGAAVIVNDLGGDIKGGGKSSAAADKVVEEIRAAGGKAVANYDSVEDGEKLIQTALDAFGRIDVVVNNAGILRDRSFARTSDVDWDLIQRVHLRGSFLVTRAAWNHMKQQKFGRIIMTSSAAGIYGNFGQANYSAAKLGLLGLANTLAIEGQKYNIHCNTIAPTAGSRLTETVMPPDLVQSLKAEYVAPLVLWLCHESCQENSGLFEVGAGWIGKLRWERSLGRIVRQKSECVTPEAVRDAWRDICDFTNATKPASIQESLQTLVEVLSRVEDERKIGANPTAVATNPAQAIGHVLPDMTFTHTHMNCILYALGVGVSSRDPQQLQFLYEGHTHFSCLPTFGVIPAQGALLGLGSIPGLDIDFTRLLHGEQYLELYKPLPTSGTLTSRATVADVLDKGSGMLILLDVHTYSEQELLCYNQFSVFIVGSGGFGGKRVSQKAVAPAAPPDRPADAVVVEETSRDQAALYRLSGDWNPLHIDPNFAAMGGFQSPILHGLCSFGFAARHVLKQFAGNDVSRFKAMKVRFVKPVYPGQSLQTEMWKENSRVHIQCTVKESGAVVLSGAYIDLHPAASVNTGPPQTELQSDLVFAEIERRIKDSGEELVKKVNAVFGWEITTDGETRRHWTVDLKTGRGSVQRAAAKADVTFTVSDQDFMEVVMGKLNPQKAFFAGKLKVKGNIMLSQKLEAVLKDQARL

SEQ ID NO: 188 - DNA, 2211 bp, Danio rerio; identical to SEQ ID NO: 186

SEQ ID NO: 189 - protein, 741 aa, Xenopus laevis
MDSQVLRFDGRVVLVTGAGGGLGRTYALAFAERGASVVVNDLGGDIKGEGKSSFAADKVVEEIRAKGGKAVANYDSVEAGEKLVQSALDAFGRIDIIINNAGILRDRSFARISDADWDIIHRVHLKGSFLITRAAWNHMKNQKFGRIIMTSSAAGIYGNFGQANYSAAKLGLVGLSNTLAIEGTKYNIQSNCIAPTAGSRLTQTVMPQDLLDALKPEYVTPLVLWLCHERCQETGSLFEVGAGWVGKLRWERSLGAIIRQTNRPMTPEAVRDEWAKICDFDNADKPQTIQDSINPLYQVLSQVDSEKGVSMNPTSHGTSLSSSSIDPAKAIGQKLPVTLYKYSHLEPILYALGVGMSTRDPDHLKFLYEGSEDFSCLPSFGVVVSQAAFMSGGLASVPGLNIDFTRVLHGEQYLEVYKPLPTSGEMTSHATVADIMDKGSGAIILLDVHTYHGADLICYNQFSVFVVGAGGFGGKRSSSKAKATENPPSRPPDVVEIDVTNADQAALYRLSGDWNPLHIDPSFAALGGFERPILHGLCSFGFSARHVLKHFANNDVTKFKAIKVRFAKPVLPGQTLQTEMWKEGNRIFLQTKVKETGEIAIAGAYVDLASTVNNPESKAAVQDGGLQSDLVFEEISRRVKDVGGQLVKKVNAVFQWDITKDGKTASQWTIDLKSGGSGEVYRGKARGRADTSFTLSDEDFMELVLGKVNPQKAFFAGKLKVKGNIMLSQKLEMILKDYAKL

SEQ ID NO: 190 - DNA, 2226 bp, Xenopus laevis
atggattctcaagttttgagattcgatggtagagttgttttggttacaggtgctggtggtggtttgggtagaacttatgctttagcatttgctgaaagaggtgcatcagttgttgttaatgatttgggtggtgacattaaaggtgagggtaaatcttcatttgctgcagataaggttgttgaagaaatcagagctaaaggtggtaaagcagttgctaattacgattctgttgaagcaggtgaaaaattggttcaatcagctttagatgcattcggtagaatcgatatcattattaacaatgctggtattttgagagatagatctttcgctagaatttcagatgcagattgggatatcatccatagagttcatttgaagggttcatttttgatcacaagagctgcatggaatcatatgaagaaccaaaagttcggtagaatcattatgacttcttcagctgcaggtatctatggtaacttcggtcaagctaactactctgctgcaaagttgggtttagttggtttatcaaacacattggcaattgaaggtactaagtacaacatccaatctaactgtattgctccaacagcaggttcaagattaactcaaacagttatgccacaagatttgttagatgctttgaaaccagaatacgttacaccattggttttatggttgtgtcatgaaagatgtcaagaaactggttctttatttgaagttggtgctggttgggttggtaaattgagatgggaaagatcattaggtgcaatcatcagacaaactaacagaccaatgacaccagaagctgttagagatgaatgggcaaagatctgtgatttcgataacgctgataagccacaaactatccaagattctattaatccattgtaccaagttttgtcacaagttgattctgaaaaaggtgtttcaatgaatccaacttcacatggtacatctttatcttcatcttcaattgatccagcaaaagctattggtcaaaagttgccagttacattgtacaagtactctcatttggaaccaatcttgtatgctttgggtgttggcatgtcaactagagatccagatcatttgaagttcttgtacgaaggttcagaagatttctcttgtttgccatcatttggtgttgttgtttctcaagctgcttttatgtctggtggtttggcttcagttccaggtttaaacatcgatttcacaagagttttgcatggtgaacaatatttggaagtttacaagccattgccaacttctggtgaaatgacttcacatgctacagttgcagatattatggataaaggttctggtgctatcatcttgttggatgttcatacttaccatggtgcagatttgatctgttacaaccaattttcagtttttgttgttggtgctggtggttttggtggtaaaagatcttcatctaaagcaaaagctacagaaaatccaccatctagaccaccagatgttgttgaaattgatgttactaatgcagatcaagctgcattatatagattgtctggtgactggaatccattacatattgatccatcatttgctgcattgggtggttttgaaagaccaatcttgcatggtttgtgttctttcggtttttcagctagacatgttttgaagcatttcgcaaacaacgatgttacaaagtttaaagctattaaagttagattcgcaaagccagttttgccaggtcaaactttacaaacagaaatgtggaaggagggtaacagaattttcttgcaaactaaggttaaggaaacaggtgaaatcgcaattgctggtgcatacgttgatttggcttctactgttaataatccagaatcaaaagctgcagttcaagatggtggtttacaatctgatttggttttcgaagaaatttcaagaagagttaaagatgttggtggtcaattggttaagaaagttaacgctgttttccaatgggatatcactaaggatggtaaaacagcatctcaatggactattgatttgaaatcaggtggttctggtgaagtttatcgtggtaaagctagaggtagagcagatacttcttttacattgtcagatgaagatttcatggaattagttttgggtaaagttaacccacaaaaagctttctttgctggtaaattaaaagttaaaggtaatattatgttatctcaaaaattggaaatgattttaaaagattacgctaaattgtaa

SEQ ID NO: 191 - protein, 731 aa, Hydra vulgaris
MSSLSFAGRVAVITGAGGGLGREYALEFAKRGAQVVVNDLGGSFKGEGSSTLLADQVVKEIINAGGKAVANYDSVENGEQIIKTAIQEFGKVDILINNAGILRDRSFSKMSDKDWEQIFKVHVDGAFKCTQAVWPYMQKQKFGRIIMTSSPAGLYGNFGQANYSAAKAALIGLMNTLSIEGKKANINVNVIAPLAETRMTADILPGAGLLPEHVAPFVVFMCHESCVDTGIILEAAGGFACKTRLQRSQGIQLRKYIGDKPTVECVQKNWTKISDFSLSCNPRSVQEASNKIMESIGDLPSEPLSTSASLLEKVRSYKFPSITVIYDQNDIIKYALSVGSSLPDDSQFLYEGHANFSAIPTFAAILSQKAVFSELAEGNIPGMDMIDLSKVLHGEQFIEIFKPIPTSGQFTVKGQIRDILDKHKFCQFIIDVNVFDAKNELVCMSQFVLLFIGSKGIGHRGKYDGQKPTLFPPKRKPDHVVEEVTSINQAALYRLNGDFNPLHIDPQISSMLGFEKPLLHGLCTYGYALRHVLKAYANNDASFFKSIKAQFSKPVIPGQTIMTEMWHEANRVYYQVKVKETGDVVIKGGYVDFHKELKGQSSVSASAHSYGIDSSLQSSHAMKKIEDSLKTADEAVLKQINGSFLFQITKENKLAGEWLLNFNQFPVTVTYGVPITKPDVTITINDDDFVLIATGKLNPMQAFSQGKLKAFGKVILALKLGDIFKSVSSKL

SEQ ID NO: 192 - DNA, 2196 bp, Hydra vulgaris
atgtcttcattatcttttgctggtagagttgcagttattactggtgctggtggtggtttgggtagagaatatgctttggaatttgcaaaaagaggtgctcaagttgttgttaatgatttgggtggttcttttaaaggtgaaggttcttcaactttgttggcagatcaagttgttaaggaaattattaacgctggtggtaaagctgttgcaaattacgattctgttgaaaacggtgaacaaattattaagacagcaatccaagaattcggtaaagttgatatcttgattaataacgctggtattttgagagatagatctttttcaaagatgtctgataaggattgggaacaaatttttaaggttcatgttgatggtgcttttaaatgtactcaagctgtttggccatacatgcaaaagcaaaagttcggtagaatcatcatgacatcttcaccagcaggtttatacggtaacttcggtcaagctaactactcagctgcaaaagctgcattgatcggtttgatgaacacattgtctatcgaaggtaaaaaggctaacatcaacgttaacgttatcgctccattggcagaaactagaatgacagcagatattttaccaggtgctggtttgttaccagaacatgttgcaccattcgttgtttttatgtgtcatgaatcatgtgttgatactggtatcatcttagaagctgcaggtggtttcgcttgtaagacaagattgcaaagatctcaaggtattcaattgagaaagtacatcggtgacaaaccaactgttgaatgtgttcaaaagaattggacaaagatctctgatttctctttgtcatgtaatccaagatcagttcaagaagcatctaataagatcatggaatcaatcggtgacttgccatctgaaccattgtctacttcagcttctttgttagaaaaagttagatcatataaatttccatctattactgttatatatgatcaaaacgatattattaagtacgctttgtcagttggttcttcattgccagatgattctcaattcttgtacgaaggtcatgcaaacttctctgctattccaacttttgctgcaattttgtcacaaaaagcagttttctctgaattagctgagggtaacatccctggtatggatatgatcgatttgtcaaaggttttgcatggtgaacaattcattgaaatttttaagccaatcccaacttctggtcaattcactgttaaaggtcaaatcagagatatcttggataagcataagttttgtcaattcattattgatgttaatgtttttgatgctaaaaatgaattggtttgtatgtcacaattcgttttgttgtttattggttctaaaggtattggtcatcgtggtaaatacgatggtcaaaagccaactttgtttccaccaaaaagaaaaccagatcatgttgttgaagaagttacatctattaatcaagctgcattgtacagattgaatggtgacttcaacccattgcatatcgatccacaaatctcttcaatgttgggtttcgaaaagccattgttgcatggtttgtgtacttatggttacgctttgagacatgttttgaaggcttacgcaaacaacgatgcatctttctttaagtctattaaagctcaattttcaaagccagttattccaggtcaaactattatgacagaaatgtggcatgaagctaacagagtttactaccaagttaaggttaaagaaacaggtgacgttgttattaaaggtggttacgttgatttccataaggaattgaaaggtcaatcttcagtttcagcttctgcacattcttacggtattgattcttcattgcaatcttcacatgcaatgaagaaaattgaagattcattgaagactgctgatgaagcagttttgaagcaaattaatggttcatttttgttccaaatcacaaaggaaaataagttggctggtgaatggttgttgaacttcaaccaattcccagttactgttacatatggtgttccaatcactaagccagatgttactatcacaattaatgatgatgatttcgttttgatcgcaactggtaaattgaacccaatgcaagctttttcacagggtaaattgaaggcattcggtaaagttattttggctttgaagttgggtgacatttttaagtctgtttcttcaaaattgtaa

SEQ ID NO: 193 - protein, 900 aa, Saccharomyces cerevisiae
MPGNLSFKDRVVVITGAGGGLGKVYALAYASRGAKVVVNDLGGTLGGSGHNSKAADLVVDEIKKAGGIAVANYDSVNENGEKIIETAIKEFGRVDVLINNAGILRDVSFAKMTEREFASVVDVHLTGGYKLSRAAWPYMRSQKFGRIINTASPAGLFGNFGQANYSAAKMGLVGLAETLAKEGAKYNINVNSIAPLARSRMTENVLPPHILKQLGPEKIVPLVLYLTHESTKVSNSIFELAAGFFGQLRWERSSGQIFNPDPKTYTPEAILNKWKEITDYRDKPFNKTQHPYQLSDYNDLITKAKKLPPNEQGSVKIKSLCNKVVVVTGAGGGLGKSHAIWFARYGAKVVVNDIKDPFSVVEEINKLYGEGTAIPDSHDVVTEAPLIIQTAISKFQRVDILVNNAGILRDKSFLKMKDEEWFAVLKVHLFSTFSLSKAVWPIFTKQKSGFIINTTSTSGIYGNFGQANYAAAKAAILGFSKTIALEGAKRGIIVNVIAPHAETAMTKTIFSEKELSNHFDASQVSPLVVLLASEELQKYSGRRVIGQLFEVGGGWCGQTRWQRSSGYVSIKETIEPEEIKENWNHITDFSRNTINPSSTEESSMATLQAVQKAHSSKELDDGLFKYTTKDCILYNLGLGCTSKELKYTYENDPDFQVLPTFAVIPFMQATATLAMDNLVDNFNYAMLLHGEQYFKLCTPTMPSNGTLKTLAKPLQVLDKNGKAALVVGGFETYDIKTKKLIAYNEGSFFIRGAHVPPEKEVRDGKRAKFAVQNFEVPHGKVPDFEAEISTNKDQAALYRLSGDFNPLHIDPTLAKAVKFPTPILHGLCTLGISAKALFEHYGPYEELKVRFTNVVFPGDTLKVKAWKQGSVVVFQTIDTTRNVIVLDNAAVKLSQAKSKL

SEQ ID NO: 194 - DNA, 2703 bp, Saccharomyces cerevisiae
atgcctggaaatttatccttcaaagatagagttgttgtaatcacgggcgctggagggggcttaggtaaggtgtatgcactagcttacgcaagcagaggtgcaaaagtggtcgtcaatgatctaggtggcactttgggtggttcaggacataactccaaagctgcagacttagtggtggatgagataaaaaaagccggaggtatagctgtggcaaattacgactctgttaatgaaaatggagagaaaataattgaaacggctataaaagaattcggcagggttgatgtactaattaacaacgctggaatattaagggatgtttcatttgcaaagatgacagaacgtgagtttgcatctgtggtagatgttcatttgacaggtggctataagctatcgcgtgctgcttggccttatatgcgctctcagaaatttggtagaatcattaacaccgcttcccctgccggtctatttggaaattttggtcaagctaattattcagcagctaaaatgggcttagttggtttggcggaaaccctcgcgaaggagggtgccaaatacaacattaatgttaattcaattgcgccattggctagatcacgtatgacagaaaacgtgttaccaccacatatcttgaaacagttaggaccggaaaaaattgttcccttagtactctatttgacacacgaaagtacgaaagtgtcaaactccatttttgaactcgctgctggattctttggacagctcagatgggagaggtcttctggacaaattttcaatccagaccccaagacatatactcctgaagcaattttaaataagtggaaggaaatcacagactatagggacaagccatttaacaaaactcagcatccatatcaactctcggattataatgatttaatcaccaaagcaaaaaaattacctcccaatgaacaaggctcagtgaaaatcaagtcgctttgcaacaaagtcgtagtagttacgggtgcaggaggtggtcttgggaagtctcatgcaatctggtttgcacggtacggtgcgaaggtagttgtaaatgacatcaaggatcctttttcagttgttgaagaaataaataaactatatggtgaaggcacagccattccagattcccatgatgtggtcaccgaagctcctctcattatccaaactgcaataagtaagtttcagagagtagacatcttggtcaataacgctggtattttgcgtgacaaatcttttttaaaaatgaaagatgaggaatggtttgctgtcctgaaagtccaccttttttccacattttcattgtcaaaagcagtatggccaatatttaccaaacaaaagtctggatttattatcaatactacttctacctcaggaatttatggtaattttggacaggccaattatgccgctgcaaaagccgccattttaggattcagtaaaactattgcactggaaggtgccaagagaggaattattgttaatgttatcgctcctcatgcagaaacggctatgacaaagactatattctcggagaaggaattatcaaaccactttgatgcatctcaagtctccccacttgttgttttgttggcatctgaagaactacaaaagtattctggaagaagggttattggccaattattcgaagttggcggtggttggtgtgggcaaaccagatggcaaagaagttccggttatgtttctattaaagagactattgaaccggaagaaattaaagaaaattggaaccacatcactgatttcagtcgcaacactatcaacccgagctccacagaggagtcttctatggcaaccttgcaagccgtgcaaaaagcgcactcttcaaaggagttggatgatggattattcaagtacactaccaaggattgtatcttgtacaatttaggacttggatgcacaagcaaagagcttaagtacacctacgagaatgatccagacttccaagttttgcccacgttcgccgtcattccatttatgcaagctactgccacactagctatggacaatttagtcgataacttcaattatgcaatgttactgcatggagaacaatattttaagctctgcacgccgacaatgccaagtaatggaactctaaagacacttgctaaacctttacaagtacttgacaagaatggtaaagccgctttagttgttggtggcttcgaaacttatgacattaaaactaagaaactcatagcttataacgaaggatcgttcttcatcaggggcgcacatgtacctccagaaaaggaagtgagggatgggaaaagagccaagtttgctgtccaaaattttgaagtgccacatggaaaggtaccagattttgaggcggagatttctacgaataaagatcaagccgcattgtacaggttatctggcgatttcaatcctttacatatcgatcccacgctagccaaagcagttaaatttcctacgccaattctgcatgggctttgtacattaggtattagtgcgaaagcattgtttgaacattatggtccatatgaggagttgaaagtgagatttaccaatgttgttttcccaggtgatactctaaaggttaaagcttggaagcaaggctcggttgtcgtttttcaaacaattgatacgaccagaaacgtcattgtattggataacgccgctgtaaaactatcgcaggcaaaatctaaactataa

SEQ ID NO: 195 - protein, 462 aa, Arabidopsis thaliana
MEKAIERQRVLLEHLRPSSSSSHNYEASLSASACLAGDSAAYQRTSLYGDDVVIVAAHRTPLCKSKRGNFKDTYPDDLLAPVLRALIEKTNLNPSEVGDIVVGTVLAPGSQRASECRMAAFYAGFPETVAVRTVNRQCSSGLQAVADVAAAIKAGFYDIGIGAGLESMTTNPMAWEGSVNPAVKKFAQAQNCLLPMGVTSENVAQRFGVSRQEQDQAAVDSHRKAAAATAAGKFKDEIIPVKTKLVDPKTGDEKPITVSVDDGIRPTTTLASLGKLKPVFKKDGTTTAGNSSQVSDGAGAVLLMKRSVAMQKGLPVLGVFRTFAAVGVDPAIMGIGPAVAIPAAVKAAGLELDDIDLFEINEAFASQFVYCRNKLGLDPEKINVNGGAMAIGHPLGATGARCVATLLHEMKRRGKDCRFGVVSMCIGTGMGAAAVFERGDGVDELRNARKVEAQGLLSKDAR

SEQ ID NO: 196 - DNA, 1389 bp, Arabidopsis thaliana
atggaaaaggctatcgaaagacaaagagttttgttggaacatttgagaccatcttcatcttcatctcataactacgaagcttcattatctgcttcagcatgtttggctggtgactctgctgcatatcaaagaacatcattatacggtgacgatgttgttattgttgctgcacatagaacaccattgtgtaagtctaagcgtggtaacttcaaggatacttacccagatgatttgttagctccagttttgagagcattgatcgaaaagactaatttgaatccatcagaagttggtgacattgttgttggtactgttttggctccaggttctcaaagagcatcagaatgtagaatggctgcattttatgctggttttccagaaactgttgcagttagaacagttaatagacaatgttcatctggtttacaagctgttgcagatgttgctgcagctattaaagctggtttctacgatatcggtattggtgcaggtttggaatctatgactacaaatccaatggcttgggaaggttcagttaatccagcagttaagaaattcgctcaagcacaaaactgtttgttgccaatgggtgttacatctgaaaatgttgctcaaagatttggtgtttcaagacaagaacaagatcaagcagctgttgattctcatagaaaagcagctgcagctactgcagctggtaaattcaaagatgaaatcatcccagttaaaactaaattagttgatccaaaaacaggtgacgaaaaaccaattactgtttctgttgatgatggtattagaccaactacaactttggcttcattgggtaaattgaagccagtttttaagaaagatggtacaactacagctggtaattcatctcaagtttctgatggtgctggtgcagttttgttgatgaagagatcagttgctatgcaaaagggtttaccagttttgggtgtttttagaacatttgcagctgttggtgttgatccagctattatgggtattggtccagctgttgcaattccagcagctgttaaagcagctggtttggaattggatgatatcgatttgttcgaaattaatgaagctttcgcatctcaattcgtttactgtagaaataagttgggtttagatccagaaaagattaatgttaacggtggtgctatggcaattggtcatccattgggtgctacaggtgcaagatgtgttgctactttgttgcatgaaatgaagagacgtggtaaagattgtagattcggtgttgtttctatgtgtattggtactggtatgggtgcagctgcagtttttgaaagaggtgacggtgttgatgaattgagaaatgctagaaaagttgaagcacaaggtttgttatcaaaagatgctagataa

SEQ ID NO: 197 - protein, 389 aa, Rhodobacteraceae bacterium HTCC2083
MKQAVIVSTARSGLAKSFRGSLNQTHGATLGAHSVQNAISRAGIDPASVEDVLIGCATPEGATGGNIARQIALRAGLPVSVCGATVNRFCSSGLQTIAMAAQSIQNGAGPMVAGGVESISLTGNHAVPSHDPWIKEHKPAVYMTMIETADNVAERYKISRDAQDEYGLRSQLRMAAAQAAGKFADEIVPMAATMAVKDKETGEISQHEVTVDRDECNRPQTNIEGLTGLSPVREGGYVTAGNASQLSDGSAAVVLMEASEAERQGIEPLGAFKGFAVAGCEPDEMGIGPVYAVPRLLERHGLKVDDIDLWELNEAFASQALYSRDRLGIDDEKCNVNGGSIAIGHPFGMSGTRMTGHLLLEGKRRGAKLGVVTMCIGGGMGAAGLFEIF

SEQ ID NO: 198 - DNA, 1170 bp, Rhodobacteraceae bacterium HTCC2083
atgaaacaagctgttattgtttcaactgcaagatctggtttggctaagtcttttagaggttctttgaaccaaactcatggtgcaacattaggtgctcattcagttcaaaatgcaatttctagagctggtattgatccagcatcagttgaagatgttttgattggttgtgcaactccagaaggtgctacaggtggtaatattgctagacaaattgcattaagagctggtttgccagtttcagtttgtggtgcaactgttaacagattctgttcttcaggtttgcaaacaattgctatggctgcacaatctattcaaaatggtgcaggtccaatggttgctggtggtgttgaatctatctcattgacaggtaaccatgcagttccatctcatgatccatggatcaaggaacataagccagctgtttacatgactatgatcgaaacagcagataacgttgctgaaagatacaagatctcaagagatgctcaagatgaatacggtttaagatctcaattgagaatggctgcagctcaagcagctggtaaatttgcagatgaaattgttccaatggcagctactatggctgttaaggataaggaaacaggtgaaatctcacaacatgaagttactgttgatagagatgaatgtaacagaccacaaactaacatcgaaggtttgacaggtttgtctccagttagagaaggtggttacgttacagctggtaatgcttctcaattgtcagatggttctgcagctgttgttttaatggaagcatctgaagctgaaagacaaggtattgaaccattgggtgcttttaaaggttttgcagttgctggttgtgaaccagatgaaatgggtattggtccagtttatgctgttccaagattgttggaaagacatggtttgaaggttgatgatatcgatttgtgggaattgaatgaagcatttgcttcacaagctttatactctagagatagattgggtatcgatgatgaaaagtgtaacgttaacggtggttcaattgctattggtcatccatttggcatgtctggtactagaatgacaggtcatttgttattggaaggtaaaagaagaggtgctaaattgggtgttgttactatgtgtattggtggtggtatgggtgcagctggtttatttgaaattttctaa

SEQ ID NO: 199 - protein, 419 aa, Madurella mycetomatis
MAVLPRGIKAVLTKAPTDVVIVSSLRTPICRSYRGQLKDAYPEELLSVVLRATLDKNPQLDPAAVDDVAVGVVLSELGGSKAARMAMNHVGFPSTTSLYTTNRACASSMQSIALVAAQIRTEMIDVGIGAGMESMTRNYGSKAIPVDAWPALKESPVKDARDCVMPMGLTSENVASRYGVSRADQDAFAVESHLRAARARDAGAFDAEIVAVTTRFQEVDKQGNKVGDEQTVTVTRDDGIRTNASLEGLAKLKPAFKPDGASTAGNSSQVSDGAAATLLMRRSTATRLGLADSIMGKFVGAAVAGCAPDEMGIGPALAIPKVLNQLGLTNADVHRWEINEAFASQAIHCVHELGLEKAWQDGRVNPDGGAIALGHPLGATGARMVSTLMHGMRRSGDEIGVVSMCIGTGMGMAGVFVRE

SEQ ID NO: 200 - DNA, 1260 bp, Madurella mycetomatis
atggctgttttaccaagaggtattaaagcagttttgacaaaagctccaactgatgttgttattgtttcttcattgagaacaccaatctgtagatcatacagaggtcaattgaaagatgcatacccagaagaattgttgtctgttgttttgagagctactttggataagaatccacaattagatccagctgcagttgatgatgttgcagttggtgttgttttgtctgaattaggtggttcaaaagctgcaagaatggctatgaatcatgttggtttcccatctactacatcattgtacactacaaacagagcatgtgcttcttcaatgcaatctattgctttggttgctgcacaaatcagaacagaaatgatcgatgttggtattggtgctggtatggaatcaatgactagaaactacggttctaaggctattccagttgatgcatggccagctttaaaagaatcaccagttaaagatgcaagagattgtgttatgccaatgggtttgacatctgaaaatgttgcatcaagatacggtgtttctagagctgatcaagatgcatttgctgttgaatctcatttgagagctgcaagagctagagatgcaggtgcttttgatgcagaaattgttgctgttactacaagattccaagaagttgataagcaaggtaataaggttggtgacgaacaaactgttacagttactagagatgatggtattagaactaatgcttctttggaaggtttagcaaaattgaaaccagcttttaaaccagatggtgcatcaacagctggtaattcttcacaagtttctgatggtgctgcagctactttgttaatgagaagatcaacagcaactagattgggtttggctgattctatcatgggtaaattcgttggtgcagctgttgcaggttgtgctccagatgaaatgggtattggtccagcattggctatcccaaaggttttgaaccaattgggtttgacaaatgctgatgttcatagatgggaaattaatgaagcatttgcttcacaagcaattcattgtgttcatgaattgggtttagaaaaagcttggcaagatggtagagttaatccagatggtggtgcaattgctttaggtcatccattgggtgcaacaggtgctagaatggtttctactttaatgcatggtatgagaagatcaggtgacgaaattggtgttgtttctatgtgtattggtactggtatgggtatggctggtgtttttgttagagaataa

SEQ ID NO: 201 - protein, 440 aa, Cicer arietinum
MEKAIERQRVLLEHLQPNSSNSAFLSHTHQSTDLSASFCSAGQTGGSENDVVIVAAYRTAICKAKRGGFKDTLPDDLLAPVLKAVIEKTNVEPSEVGDIIVGTVLGPGSEKATECRMAAFYAGFPETVPLRTVNRQCSSGLQAVADVAAYIKAGFYDIGIGAGLECMSQDNISRLRNINPKVETFAQARDCLLPMGITSENVAERYGVTRQEQDQAAVESHRRAAAATAAGKFKEEIIPVSTKIVDPKTGEEKQIIVSVDDGFRPNANLTDLAKLKPAFKKDGTTTAGNASQISDGAAAVLLMKRSVAVQKGLPILGIFRSFAAVGVDPAVMGVGPAFAIPAAVKSAGLELGNIDLFEINEAFASQFVYSCKKLGLDRSKVNVNGGAIALGHPLGATGARSVATLLNEMKRRGKDCRYGVISMCIGSGMGAAAVFERGDF

SEQ ID NO: 202 - DNA, 1323 bp, Cicer arietinum
atggaaaaggctatcgaaagacaaagagttttgttggaacatttgcaaccaaactcttcaaactctgcatttttgtcacatacacatcaatctactgatttgtctgcttcattttgttctgcaggtcaaacaggtggttcagaaaacgatgttgttattgttgctgcatacagaacagctatctgtaaggcaaagagaggtggttttaaagatactttgccagatgatttgttagctccagttttgaaggcagttattgaaaagactaacgttgaaccatctgaagttggtgacattattgttggtacagttttgggtccaggttcagaaaaagctactgaatgtagaatggctgcattttacgcaggttttccagaaacagttccattgagaactgttaacagacaatgttcttcaggtttgcaagctgttgcagatgttgctgcatacatcaaggctggtttctacgatattggtattggtgcaggtttagaatgtatgtctcaagataacatctcaagattgagaaacatcaatccaaaagttgaaacatttgctcaagcaagagattgtttgttaccaatgggtatcacatctgaaaacgttgctgaaagatatggtgttactagacaagaacaagatcaagctgcagttgaatcacatagaagagctgcagctgcaacagctgctggtaaattcaaagaagaaatcatcccagtttctacaaagatcgttgatccaaagactggtgaagaaaagcaaatcatcgtttcagttgatgatggttttagaccaaacgctaatttgactgatttggctaagttgaaaccagcttttaagaaagatggtactacaactgctggtaatgcatctcaaatttcagatggtgctgcagctgttttgttgatgaagagatctgttgctgttcaaaagggtttgccaatcttgggtatttttagatcatttgcagctgttggtgttgatccagctgttatgggtgttggtccagcttttgcaattccagcagctgttaaatctgcaggtttggaattgggtaacatcgatttgttcgaaattaatgaagctttcgcatctcaattcgtttactcttgtaagaaattgggtttggatagatctaaggttaacgttaatggtggtgctattgcattaggtcatccattgggtgctacaggtgcaagatcagttgctactttgttgaacgaaatgaagagacgtggtaaagattgtagatacggtgttatttctatgtgtattggttcaggcatgggtgcagctgcagtttttgaaagaggtgacttttaa

SEQ ID NO: 203 - protein, 417 aa, Saccharomyces cerevisiae
MSQRLQSIKDHLVESAMGKGESKRKNSLLEKRPEDVVIVAANRSAIGKGFKGAFKDVNTDYLLYNFLNEFIGRFPEPLRADLNLIEEVACGNVLNVGAGATEHRAACLASGIPYSTPFVALNRQCSSGLTAVNDIANKIKVGQIDIGLALGVESMTNNYKNVNPLGMISSEELQKNREAKKCLIPMGITNENVAANFKISRKDQDEFAANSYQKAYKAKNEGLFEDEILPIKLPDGSICQSDEGPRPNVTAESLSSIRPAFIKDRGTTTAGNASQVSDGVAGVLLARRSVANQLNLPVLGRYIDFQTVGVPPEIMGVGPAYAIPKVLEATGLQVQDIDIFEINEAFAAQALYCIHKLGIDLNKVNPRGGAIALGHPLGCTGARQVATILRELKKDQIGVVSMCIGTGMGAAAIFIKE

SEQ ID NO: 204 - DNA, 1254 bp, Saccharomyces cerevisiae
atgtctcaaagactacaaagtatcaaggatcatttggtggagagcgccatgggtaagggtgaatcgaagaggaagaactcgttgctggagaaaagacccgaagatgtagttattgtggctgctaacaggtctgccatcggtaaaggttttaaaggtgccttcaaagatgtaaacacagactacttattatacaactttctcaatgagttcatcgggaggtttccggaacctttgagggctgatttgaacttaatcgaagaagttgcctgtggaaatgttctcaatgttggagccggtgctacagaacacagggctgcatgcttggcaagtgggattccctactcgacgccatttgtcgctttaaacagacaatgttcttcaggtttaacggcggtgaacgatattgccaacaagattaaggttgggcaaattgatattggtttggcgctgggagtggaatcaatgaccaataactacaaaaacgtcaatcccttgggcatgatctcctctgaagagctgcaaaaaaaccgagaagcgaagaaatgtctaataccaatgggcattactaatgagaatgttgccgctaatttcaagatcagtagaaaggatcaagacgagttcgctgcgaattcatatcaaaaagcttacaaggcgaaaaatgaggggcttttcgaagatgaaattttacctataaaattaccagatggctcaatttgccagtcggacgaagggccacgccctaacgtcactgcggagtcgctttcaagcatcaggcctgcctttatcaaagacagaggaaccacaactgcgggcaatgcatcccaggtctccgatggtgtggcaggtgtcttgttagcccgcaggtccgtagccaaccagttaaatctgcctgtgctaggtcgctacatcgattttcaaacagtgggggttccccctgaaatcatgggtgtgggccctgcatacgccataccaaaagtcctggaagctactggcttgcaagtccaagatatcgatatttttgaaataaatgaagcattcgcggcccaagcattatactgcatccataaactgggcatcgatttgaataaagtaaatccaagaggtggtgcaatcgcgttaggccatcccttgggttgtactggcgcaaggcaagtagctaccatactaagagaactgaaaaaggatcaaatcggggttgttagtatgtgtatcggtactggtatgggtgccgccgccatctttattaaagaatag

SEQ ID NO: 205 - protein, 398 aa, Saccharomyces cerevisiae
MSQNVYIVSTARTPIGSFQGSLSSKTAVELGAVALKGALAKVPELDASKDFDEIIFGNVLSANLGQAPARQVALAAGLSNHIVASTVNKVCASAMKAIILGAQSIKCGNADVVVAGGCESMTNAPYYMPAARAGAKFGQTVLVDGVERDGLNDAYDGLAMGVHAEKCARDWDITREQQDNFAIESYQKSQKSQKEGKFDNEIVPVTIKGFRGKPDTQVTKDEEPARLHVEKLRSARTVFQKENGTVTAANASPINDGAAAVILVSEKVLKEKNLKPLAIIKGWGEAAHQPADFTWAPSLAVPKALKHAGIEDINSVDYFEFNEAFSVVGLVNTKILKLDPSKVNVYGGAVALGHPLGCSGARVVVTLLSILQQEGGKIGVAAICNGGGGASSIVIEKI

SEQ ID NO: 206 - DNA, 1197 bp, Saccharomyces cerevisiae
atgtctcagaacgtttacattgtatcgactgccagaaccccaattggttcattccagggttctctatcctccaagacagcagtggaattgggtgctgttgctttaaaaggcgccttggctaaggttccagaattggatgcatccaaggattttgacgaaattatttttggtaacgttctttctgccaatttgggccaagctccggccagacaagttgctttggctgccggtttgagtaatcatatcgttgcaagcacagttaacaaggtctgtgcatccgctatgaaggcaatcattttgggtgctcaatccatcaaatgtggtaatgctgatgttgtcgtagctggtggttgtgaatctatgactaacgcaccatactacatgccagcagcccgtgcgggtgccaaatttggccaaactgttcttgttgatggtgtcgaaagagatgggttgaacgatgcgtacgatggtctagccatgggtgtacacgcagaaaagtgtgcccgtgattgggatattactagagaacaacaagacaattttgccatcgaatcctaccaaaaatctcaaaaatctcaaaaggaaggtaaattcgacaatgaaattgtacctgttaccattaagggatttagaggtaagcctgatactcaagtcacgaaggacgaggaacctgctagattacacgttgaaaaattgagatctgcaaggactgttttccaaaaagaaaacggtactgttactgccgctaacgcttctccaatcaacgatggtgctgcagccgtcatcttggtttccgaaaaagttttgaaggaaaagaatttgaagcctttggctattatcaaaggttggggtgaggccgctcatcaaccagctgattttacatgggctccatctcttgcagttccaaaggctttgaaacatgctggcatcgaagacatcaattctgttgattactttgaattcaatgaagccttttcggttgtcggtttggtgaacactaagattttgaagctagacccatctaaggttaatgtatatggtggtgctgttgctctaggtcacccattgggttgttctggtgctagagtggttgttacactgctatccatcttacagcaagaaggaggtaagatcggtgttgccgccatttgtaatggtggtggtggtgcttcctctattgtcattgaaaagatatga

SEQ ID NO: 207 - protein, 255 aa, Escherichia coli
MFNSDNLRLDGKCAIITGAGAGIGKEIAITFATAGASVVVSDINADAANHVVDEIQQLGGQAFACRCDITSEQELSALADFAISKLGKVDILVNNAGGGGPKPFDMPMADFRRAYELNVFSFFHLSQLVAPEMEKNGGGVILTITSMAAENKNINMTSYASSKAAASHLVRNMAFDLGEKNIRVNGIAPGAILTDALKSVITPEIEQKMLQHTPIRRLGQPQDIANAALFLCSPAASWVSGQILTVSGGGVQELN

SEQ ID NO: 208 - DNA, 768 bp, Escherichia coli
atgttcaactctgataatttgagattggatggtaaatgtgctatcatcactggtgcaggtgctggtatcggtaaagaaatcgcaatcacttttgcaacagctggtgcatctgttgttgtttcagatattaatgctgatgctgcaaaccatgttgttgatgaaatccaacaattgggtggtcaagcttttgcatgtagatgtgatatcacatctgaacaagaattgtcagctttggcagatttcgctatctctaagttgggtaaagttgatattttagttaataatgctggtggtggtggtcctaaaccatttgatatgccaatggctgatttcagaagagcatacgaattgaacgttttctctttctttcatttgtcacaattagttgctccagaaatggaaaagaatggtggtggtgttattttgactatcacatctatggctgcagaaaataagaacatcaacatgacttcttacgcttcttcaaaagctgcagcttcacatttggttagaaacatggcattcgatttgggtgaaaagaatatcagagttaacggtatcgctccaggtgcaatcttgactgatgctttgaagtcagttattacaccagaaatcgaacaaaagatgttgcaacatactccaattagaagattaggtcaaccacaagatatcgctaacgcagctttgtttttatgttctccagcagcttcttgggtttcaggtcaaattttgactgtttctggtggtggtgttcaagaattaaattaa

SEQ ID NO: 209 - protein, 253 aa, Luminiphilus syltensis
MDLGIKGKVALITGSTKGIGRGIAEAFAAEGCHVGICARNSDEVDAAVKELSASGVKVAGGVVDVADPASLETWVSQCVAELGGVDFFVPNVSAGGADASEDGWRANFEADLLSTWRGVQLTQPHIEKSECGAIVVISSTAAIEAFAGATPYGAMKAALLNYAGNLAHDLAPKGIRVNSVSPGPIFIEGGAWDQIKEAMPEIYEGTVAAIPMGRMGSAQEVADQVVFLCSPRASFTTGTNVVLDGAFTKGLQF

SEQ ID NO: 210 - DNA, 762 bp, Luminiphilus syltensis
atggatttgggtattaaaggtaaagttgctttgatcactggttctacaaaaggtattggtagaggtattgctgaagcatttgctgcagaaggttgtcatgttggtatttgtgctagaaattcagatgaagttgatgctgcagttaaagaattgtctgcttcaggtgttaaagttgcaggtggtgttgttgatgttgcagatccagcttctttggaaacttgggtttcacaatgtgttgctgaattaggtggtgttgatttctttgttccaaatgtttctgcaggtggtgctgatgcatcagaagatggttggagagcaaacttcgaagctgatttgttgtctacttggagaggtgttcaattgacacaaccacatatcgaaaaatcagaatgtggtgctattgttgttatttcttcaactgctgcaattgaagcttttgcaggtgctacaccatatggtgctatgaaagctgcattgttaaattacgctggtaatttggctcatgatttggcaccaaaaggtattagagttaattctgtttcaccaggtccaattttcattgaaggtggtgcttgggatcaaattaaagaagcaatgccagaaatctatgaaggtacagttgctgcaattccaatgggtagaatgggttctgctcaagaagttgcagatcaagttgttttcttgtgttctccaagagcttcttttactacaggtactaacgttgttttggatggtgcttttactaaaggtttacaattttaa

SEQ ID NO: 211 - protein, 259 aa, Bacteroides fragilis
MNRFENKIIIITGAAGGIGASTTRRIVSEGGKVVIADYSREKADQFAAELSNSGADVRPVYFSATELKSCKELITFTMKEYGQIDVLVNNVGGTNPRRDTNIETLDMDYFDEAFHLNLSCTMYLSQLVIPIMSTQGGGNIVNVASISGITADSNGTLYGASKAGVINLTKYIATQTGKKNIRCNAVAPGLILTPAALNNLNEEVRKIFLGQCATPYLGEPQDVAATIAFLASEDARYITGQTIVVDGGLTIHNPTINLV

SEQ ID NO: 212 - DNA, 780 bp, Bacteroides fragilis
atgaacagattcgaaaataagatcatcatcatcactggtgctgcaggtggtattggtgcttctactacaagaagaattgtttcagaaggtggtaaagttgttattgctgattactctagagaaaaggcagatcaatttgctgcagaattgtctaattcaggtgctgatgttagaccagtttacttctctgcaactgaattgaagtcttgtaaggaattgatcacttttacaatgaaggaatacggtcaaatcgatgttttggttaacaacgttggtggtacaaatccaagaagagatactaacatcgaaacattggatatggattactttgatgaagctttccatttgaatttgtcttgtactatgtacttgtcacaattagttattccaatcatgtcaacacaaggtggtggtaacatcgttaacgttgcttctatctcaggtattactgcagattctaatggtacattgtatggtgcttcaaaggcaggtgttattaatttgactaagtacatcgctactcaaacaggtaaaaagaatatcagatgtaacgctgttgcaccaggtttgattttaacaccagctgcattgaacaatttgaacgaagaagttagaaagattttcttgggtcaatgtgctactccatatttgggtgaaccacaagatgttgctgcaacaattgcatttttggcatctgaagatgcaagatacattactggtcaaacaattgttgttgatggtggtttgactattcataatccaactattaatttggtttaa

SEQ ID NO: 213 - protein, 256 aa, Comamonas testosteroni
MNEIFRQFSLEGKVAVVTGAGKGIGRACAVTLAKAGADVALFARTEADLQAVKAEIEALGRRAIAVQGDVNKEEDLDKLIVRTVEELGKINVLINNVGGGGPNDPRKVAGKAVGDMLAFNVVPAYTLIQKAAAAMEAAGGGAVVNISSTAARYSQKYFSAYGAAKAALNQMTRCLAQDFGPKVRINAIEPGTIMTDALAPFLTPDRKERMEKTTPMARMGQPEDIANAALFLASPASSWVTGKVLGVDGGVEAPNF

SEQ ID NO: 214 - DNA, 771 bp, Comamonas testosteroni
atgaacgaaatttttagacaattttctttggagggtaaagttgcagttgttactggtgctggtaaaggtattggtagagcttgtgcagttacattagctaaagcaggtgctgatgttgcattgtttgctagaacagaagcagatttgcaagcagttaaagctgaaattgaagctttgggtagaagagcaattgctgttcaaggtgacgttaataaggaagaagatttggataagttgattgttagaactgttgaagaattgggtaaaattaatgttttgattaataatgttggtggtggtggtccaaatgatccaagaaaagttgctggtaaagctgttggtgacatgttggcttttaatgttgttccagcttacactttgattcaaaaagctgcagctgcaatggaagctgctggtggtggtgctgttgttaacatctcttcaacagctgcaagatactctcaaaagtacttctcagcttatggtgctgcaaaagctgcattgaatcaaatgactagatgtttagcacaagatttcggtccaaaagttagaattaatgctatcgaaccaggtactatcatgacagatgcattggctccatttttaacaccagatagaaaggaaagaatggaaaagactacaccaatggcaagaatgggtcaaccagaagatattgctaatgctgcattgtttttagcatcaccagcttcttcatgggttactggtaaagttttaggtgttgatggtggtgttgaagctccaaatttttaa

SEQ ID NO: 215 - protein, 272 aa, Pseudomonas syringae
MPIALITGCSSGIGRALADAFKATGYEVWATARKADDVAALSAAGFIAVQLDVNDSMALEQLAAGLEHSGLDVLINNAGYGAMGPLLDGGVQALQRQFETNVFSVIGVTRALFPALRRNKGLVVNIGSVSGVLVTPFAGAYCASKAAVHALSDALRLELAPFGVQVMEVQPGAIASSFAKNASHEAEQLISEQSPWWPIREGIRARARASLDNPTPVTEFARDLLKAVQHTRPPRLLRLGNGSRLLPLMAWLLPKGLLDMALRKRFGLNADL

SEQ ID NO: 216 - DNA, 819 bp, Pseudomonas syringae
atgccaattgctttaattactggttgttcttcaggtattggtagagctttggcagatgcttttaaagctactggttatgaagtttgggcaacagctagaaaagcagatgatgttgctgcattatctgctgcaggttttattgctgttcaattggatgttaacgattctatggcattggaacaattggctgcaggtttagaacattcaggtttggatgttttgattaataacgctggttacggtgcaatgggtccattgttagatggtggtgttcaagctttgcaaagacaattcgaaactaacgttttctctgttattggtgttacaagagctttatttccagcattgagaagaaataagggtttagttgttaacatcggttctgtttcaggtgttttggttactccatttgcaggtgcttattgtgcttctaaagctgcagttcatgctttatcagatgcattgagattagaattggcaccatttggtgttcaagttatggaagttcaaccaggtgcaattgcttcttcatttgctaaaaatgcatctcatgaagctgaacaattgatctctgaacaatcaccatggtggccaattagagaaggtattagagcaagagctagagcatcattggataatccaactccagttacagaattcgctagagatttgttgaaagcagttcaacatacaagaccaccaagattgttgagattgggtaacggttctagattgttgccattgatggcttggttgttaccaaaaggtttgttggatatggctttgagaaagagattcggtttgaatgcagatttgtaa

SEQ ID NO: 217 - protein, 272 aa, Pseudomonas caricapapayae
MPIALITGCSSGIGRALADAFKATGYEVWATARKADDVAALSAAGFIAVQLDVNDSLTVEQLAAGLEHSGLDVLINNAGYGAMGPLLDGGVDALQRQFETNVFSVVGVTRALFPALRRNKGLVVNIGSVSGVLVTPFAGAYCASKAAVHALSDALRLELAPFGVQVMEVQPGAIASSFAKNASQQAEQLISEQSPWWPIREGIRARARASLDNPTPATEFARDLLKAAQQAHPPRLLRLGNGSRLLPLIAWLLPKALLENVLRKRFGLNADL

SEQ ID NO: 218 - DNA, 819 bp, Pseudomonas caricapapayae
atgccaattgctttaattactggttgttcttcaggtattggtagagctttggcagatgcttttaaagctactggttatgaagtttgggcaacagctagaaaagcagatgatgttgctgcattatctgctgcaggttttattgctgttcaattggatgttaacgattctttgacagttgaacaattagctgcaggtttggaacattcaggtttggatgttttgattaataacgctggttacggtgcaatgggtccattgttagatggtggtgttgatgctttgcaaagacaattcgaaactaacgttttctctgttgttggtgttacaagagctttatttccagcattgagaagaaataagggtttagttgttaacatcggttctgtttcaggtgttttggttactccatttgcaggtgcttattgtgcttctaaagctgcagttcatgctttatcagatgcattgagattagaattggcaccatttggtgttcaagttatggaagttcaaccaggtgcaattgcttcttcatttgctaaaaatgcatctcaacaagctgaacaattgatctctgaacaatcaccatggtggccaattagagaaggtattagagcaagagctagagcatcattggataatccaactccagctacagaatttgcaagagatttgttaaaagctgcacaacaagctcatccaccaagattgttgagattgggtaacggttctagattgttgccattgattgcttggttgttgccaaaggcattgttggaaaacgttttgagaaaaagatttggtttaaatgcagatttgtaa

SEQ ID NO: 219 - protein, 255 aa, Drosophila persimilis
MIKNAVTLVTGGASGLGRATAERLARQGASVVLADLPSSKGNEVAKELGDKVVFVPVDVTSEKDVSAALQIAKDKFGRLDLTVNCAGTATAVKTFNFNKNVAHRLEDFQRVININTVGTFNVIRLSAGLMGANEPNQDGQRGVIVNTASVAAFDGQIGQAAYAASKAAVVGMTLPIARDLSTQGIRICTIAPGLFNTPMLAALPEKVRTFLAKSIPFPQRLGEPSEYAHLVQSIFENPLLNGEVIRIDGALRMMP

SEQ ID NO: 220 - DNA, 768 bp, Drosophila persimilis
atgattaagaatgctgttactttggttacaggtggtgcatctggtttaggtagagctactgcagaaagattggctagacaaggtgcatcagttgttttggctgatttgccatcttcaaagggtaacgaagttgcaaaggaattgggtgacaaggttgttttcgttccagttgatgttacatctgaaaaagatgtttcagctgcattgcaaatcgctaaggataagttcggtagattggatttgactgttaattgtgcaggtactgctacagcagttaagacttttaatttcaataagaacgttgctcatagattggaagatttccaaagagttattaatatcaacactgttggtacttttaatgttatcagattgtcagctggtttaatgggtgcaaatgaaccaaatcaagatggtcaaagaggtgttattgttaatactgcttctgttgctgcatttgatggtcaaattggtcaagctgcatatgctgcatcaaaagctgcagttgttggtatgacattgccaattgctagagatttgtctactcaaggtattagaatctgtacaatcgcaccaggtttgtttaatactccaatgttggctgcattgccagaaaaagttagaacatttttggctaagtctatcccatttccacaaagattaggtgaaccatctgaatacgcacatttggttcaatcaatcttcgaaaacccattgttgaacggtgaagttattagaatcgatggtgctttgagaatgatgccataa

SEQ ID NO: 221 - protein, 261 aa, Clostridium sardiniensis
MNFREKYGQWGIVLGATEGIGKASAFELAKRGMDVILVGRRKEALEELAKAIHEETGKEIRVLPQDLSEYDAAERLIEATKDLDMGVIEYVACLHAMGQYNKVDYAKYEQMYRVNIRTFSKLLHHYIGEFKERDRGAFITIGSLSGWTSLPFCAEYAAEKAYMMTVTEGVAYECANTNVDVMLLSAGSTITPTWLKNKPSDPKAVAAAMYPEDVIKDGFEQLGKKFTYLAGELNREKMKENNAMDRNDLIAKLGKMFDHMA

SEQ ID NO: 222 - DNA, 786 bp, Clostridium sardiniensis
atgaacttcagagaaaagtacggtcaatggggtattgttttgggtgcaacagaaggtattggtaaagcatctgcttttgaattggctaaacgtggtatggatgttattttagttggtagaagaaaggaagctttggaagaattggcaaaggctatccatgaagaaactggtaaagaaatcagagttttgccacaagatttgtcagaatacgatgctgcagaaagattgatcgaagcaactaaggatttggatatgggtgttattgaatacgttgcatgtttgcatgctatgggtcaatacaataaggttgattacgctaagtacgaacaaatgtacagagttaacatcagaactttttctaaattgttgcatcattacatcggtgaattcaaagaaagagatagaggtgcttttattacaattggttctttgtcaggttggacttcattaccattttgtgcagaatatgctgcagaaaaagcttacatgatgactgttacagaaggtgttgcatacgaatgtgctaacacaaacgttgatgttatgttgttgtctgcaggttcaactatcacaccaacttggttgaaaaataagccatctgatccaaaagctgttgctgcagctatgtacccagaagatgttattaaagatggtttcgaacaattgggtaaaaagtttacttacttggctggtgaattgaacagagaaaagatgaaggaaaacaacgcaatggatagaaacgatttgatcgctaagttaggtaaaatgtttgatcatatggcttaa

SEQ ID NO: 223 - protein, 319 aa, Homo sapiens
MSSPQAPEDGQGCGDRGDPPGDLRSVLVTTVLNLEPLDEDLFRGRHYWVPAKRLFGGQIVGQALVAAAKSVSEDVHVHSLHCYFVRAGDPKLPVLYQVERTRTGSSFSVRSVKAVQHGKPIFICQASFQQAQPSPMQHQFSMPTVPPPEELLDCETLIDQYLRDPNLQKRYPLALNRIAAQEVPIEIKPVNPSPLSQLQRMEPKQMFWVRARGYIGEGDMKMHCCVAAYISDYAFLGTALLPHQWQHKVHFMVSLDHSMWFHAPFRADHWMLYECESPWAGGSRGLVHGRLWRQDGVLAVTCAQEGVIRVKPQVSESKL

SEQ ID NO: 224 - DNA, 960 bp, Homo sapiens
atgtcttcaccacaagctccagaagatggtcaaggttgtggtgacagaggtgacccaccaggtgacttgagatcagttttagttactacagttttgaatttggaaccattggatgaagatttgtttagaggtagacattactgggttccagcaaaaagattatttggtggtcaaattgttggtcaagctttggttgctgcagctaaatctgtttcagaagatgttcatgttcattctttgcattgttacttcgttagagcaggtgacccaaaattgccagttttataccaagttgaaagaactagaacaggttcttcattttctgttagatcagttaaagctgttcaacatggtaaaccaattttcatttgtcaagcatctttccaacaagctcaaccatcaccaatgcaacatcaattttctatgccaactgttccaccaccagaagaattgttggattgtgaaacattgatcgatcaatatttgagagatccaaatttgcaaaagagatacccattggcattaaatagaattgcagctcaagaagttccaatcgaaattaaaccagttaacccatctccattgtcacaattgcaaagaatggaaccaaagcaaatgttttgggttagagctagaggttatattggtgaaggtgacatgaaaatgcattgttgtgttgcagcttatatttctgattacgcatttttgggtactgctttgttaccacatcaatggcaacataaggttcatttcatggtttctttggatcattcaatgtggtttcatgcaccttttagagctgatcattggatgttgtacgaatgtgaatctccatgggctggtggttcaagaggtttagttcatggtagattgtggagacaagatggtgttttagcagttacatgtgctcaagaaggtgttattagagttaagccacaagtttctgaatcaaagttgtaa

SEQ ID NO: 225 - protein, 320 aa, Mus musculus
MSAPEGLGDAHGDADRGDLSGDLRSVLVTSVLNLEPLDEDLYRGRHYWVPTSQRLFGGQIMGQALVAAAKSVSEDVHVHSLHCYFVRAGDPKVPVLYHVERIRTGASFSVRAVKAVQHGKAIFICQASFQQMQPSPLQHQFSMPSVPPPEDLLDHEALIDQYLRDPNLHKKYRVGLNRVAAQEVPIEIKVVNPPTLTQLQALEPKQMFWVRARGYIGEGDIKMHCCVAAYISDYAFLGTALLPHQSKYKVNFMASLDHSMWFHAPFRADHWMLYECESPWAGGSRGLVHGRLWRRDGVLAVTCAQEGVIRLKPQVSESKL

SEQ ID NO: 226 - DNA, 963 bp, Mus musculus
atgtctgcaccagaaggtttaggtgacgcacatggtgacgctgatagaggtgacttgtctggtgacttgagatcagttttagttacttctgttttgaatttggaaccattggatgaagatttgtatagaggtagacattactgggttccaacatcacaaagattgttcggtggtcaaatcatgggtcaagctttggttgctgcagctaaatctgtttcagaagatgttcatgttcattctttgcattgttacttcgttagagcaggtgacccaaaagttccagttttgtaccatgttgaaagaattagaactggtgcttctttttcagttagagcagttaaagctgttcaacatggtaaagcaattttcatttgtcaagcttcattccaacaaatgcaaccatctccattacaacatcaattttctatgccatcagttccaccaccagaagatttgttggatcatgaagctttgatcgatcaatatttgagagatccaaatttgcataagaaatacagagttggtttgaatagagttgcagctcaagaagttccaatcgaaattaaagttgttaatccaccaactttgacacaattacaagcattggaaccaaaacaaatgttttgggttagagctagaggttatattggtgaaggtgacattaaaatgcattgttgtgttgcagcttacatctcagattacgcatttttaggtactgctttgttaccacatcaatctaagtacaaggttaacttcatggcatctttagatcattcaatgtggtttcatgcaccttttagagctgatcattggatgttgtacgaatgtgaatcaccatgggctggtggttctagaggtttagttcatggtagattgtggagaagagatggtgttttggcagttacatgtgctcaagaaggtgttattagattgaagccacaagtttctgaatcaaaattgtaa

SEQ ID NO: 227 - protein, 320 aa, Rattus norvegicus
MSKPEDLGDANGDADRGDLSGDLRSVLVTSVLNLEPLDEDLYRGRHYWVPTSQRLFGGQIVGQALVAAAKSVSEDVHVHSLHCYFVRAGDPKVPVLYHVERTRTGASFSVRAVKAVQHGKAIFICQASFQQMQPSPLQHQFSMPTVPPPEELLDHEALIDQYLRDPNLHEKYRVGLNRIAAREVPIEIKLVNPPALNQLQTLEPKQMFWVRARGYIGEGDIKMHCCVAAYISDYAFLGTALLPHQSKYKVNFMVSLDHSMWFHAPFRADHWMLYECESPWAGGSRGLVHGRLWRRDGVLAVTCAQEGVIRSKPRVSESKL

SEQ ID NO: 228 - DNA, 963 bp, Rattus norvegicus
atgtctaaaccagaagatttgggtgacgcaaatggtgacgctgatagaggtgacttgtctggtgacttgagatcagttttagttacttctgttttgaatttggaaccattggatgaagatttgtatagaggtagacattactgggttccaacatctcaaagattatttggtggtcaaattgttggtcaagcattggttgctgcagctaaatctgtttcagaagatgttcatgttcattcattgcattgttacttcgttagagcaggtgacccaaaagttccagttttgtaccatgttgaaagaactagaacaggtgcttctttttcagttagagcagttaaagctgttcaacatggtaaagcaattttcatttgtcaagcttcattccaacaaatgcaaccatctccattacaacatcaattttcaatgccaactgttccaccaccagaagaattgttggatcatgaagctttgatcgatcaatatttgagagatccaaatttgcatgaaaagtacagagttggtttgaacagaattgcagctagagaagttccaatcgaaattaaattggttaatccaccagcattgaaccaattgcaaactttggaaccaaagcaaatgttttgggttagagctagaggttatattggtgaaggtgacattaaaatgcattgttgtgttgcagcttatatttctgattacgcatttttgggtacagctttgttaccacatcaatcaaagtacaaggttaacttcatggtttctttagatcattcaatgtggtttcatgcaccttttagagctgatcattggatgttgtacgaatgtgaatcaccatgggctggtggttctagaggtttagttcatggtagattgtggagaagagatggtgttttagcagttacatgtgctcaagaaggtgttattagatctaagccaagagtttctgaatcaaagttgtaa

SEQ ID NO: 229 - protein, 290 aa, Streptomyces sp. ACT-1
MTNPAERLVDLLDLERIEVDIFRGRSPEESLQRVFGGQVAGQALVAAGRTTDGDRPVHSLHAYFLRPGRPGVPIVYQVERVRDGRSFTTRRVTAVQQGRTIFNLTASFHRPEEAGFEHQLPPARIVPDPEELPTVAEEVREHLGVLPEALERMARRQPFDIRYVDRLRWTKDEVRDADPRSAVWMRAVGPLGDDPLVHTCALTYASDMTLLDAVRIPVEPLWGPRGFDMASLDHAMWFHRPFRADEWFLYDQESPIATGGRGLARGRIYDRSGQLLVSVVQEGLFRRLEG

SEQ ID NO: 230 - DNA, 873 bp, Streptomyces sp. ACT-1
atgactaatccagctgaaagattggttgatttgttggatttggaaagaatcgaagttgatatttttagaggtagatctccagaagaatcattgcaaagagtttttggtggtcaagttgctggtcaagcattagttgctgcaggtagaactacagatggtgacagaccagttcattctttgcatgcatactttttgagaccaggtagaccaggtgttccaattgtctaccaagttgaaagagttagagatggtagatcttttactacaagaagagttacagctgttcaacaaggtagaactatttttaatttgacagcatcatttcatagaccagaagaagctggttttgaacatcaattgccaccagcaagaattgttccagatccagaagaattaccaactgttgctgaagaagttagagaacatttgggtgttttaccagaagctttggaaagaatggcaagaagacaaccattcgatatcagatacgttgatagattgagatggacaaaggatgaagttagagatgctgatccaagatctgcagtttggatgagagctgttggtccattgggtgacgatccattagttcatacttgtgctttaacatacgcatcagatatgactttgttagatgcagttagaattccagttgaaccattgtggggtccaagaggttttgatatggcatctttagatcatgctatgtggtttcatagaccttttagagctgatgaatggtttttgtatgatcaagaatcaccaattgcaacaggtggtagaggtttagctagaggtagaatctatgatagatctggtcaattgttagtttcagttgttcaagaaggtttgtttagaagattagaaggttaa

SEQ ID NO: 231 - protein, 418 aa, Homo sapiens
MIQLTATPVSALVDEPVHIRATGLIPFQMVSFQASLEDENGDMFYSQAHYRANEFGEVDLNHASSLGGDYMGVHPMGLFWSLKPEKLLTRLLKRDVMNRPFQVQVKLYDLELIVNNKVASAPKASLTLERWYVAPGVTRIKVREGRLRGALFLPPGEGLFPGVIDLFGGLGGLLEFRASLLASRGFASLALAYHNYEDLPRKPEVTDLEYFEEAANFLLRHPKVFGSGVGVVSVCQGVQIGLSMAIYLKQVTATVLINGTNFPFGIPQVYHGQIHQPLPHSAQLISTNALGLLELYRTFETTQVGASQYLFPIEEAQGQFLFIVGEGDKTINSKAHAEQAIGQLKRHGKNNWTLLSYPGAGHLIEPPYSPLCCASTTHDLRLHWGGEVIPHAAAQEHAWKEIQRFLRKHLIPDVTSQL

SEQ ID NO: 232 - DNA, 1257 bp, Homo sapiens
atgattcaattgactgcaacaccagtttctgctttagttgatgaaccagttcatattagagcaactggtttgatcccattccaaatggtttctttccaagcttcattggaagatgaaaacggtgacatgttctattctcaagcacattacagagctaacgaattcggtgaagttgatttgaaccatgcttcttcattgggtggtgactatatgggtgttcatccaatgggtttgttttggtcattgaagccagaaaagttgttgacaagattgttaaaaagagatgttatgaacagaccattccaagttcaggttaagttgtacgatttggaattgatcgttaataataaggttgcatctgctccaaaagcatcattgactttagaaagatggtatgttgctccaggtgttacaagaattaaagttagagaaggtagattgagaggtgcattgtttttaccaccaggtgaaggtttatttccaggtgttattgatttgtttggtggtttaggtggtttgttagaattcagagcatctttgttagcttcaagaggttttgcttctttggcattagcttaccataactacgaagatttgccaagaaaaccagaagttactgatttggaatactttgaagaagctgcaaatttcttgttgagacatccaaaggtttttggttctggtgttggtgttgtttcagtttgtcaaggtgttcaaatcggtttgtcaatggcaatatatttgaagcaagttactgctacagttttgattaatggtacaaacttcccattcggtattccacaagtttaccatggtcaaattcatcaaccattgccacattctgcacaattgatctcaactaacgctttgggtttgttggaattgtacagaacattcgaaactacacaagttggtgcatctcaatacttgtttccaattgaagaagctcaaggtcaatttttgtttattgttggtgaaggtgacaagactattaattctaaggcacatgctgaacaagctattggtcaattgaagagacatggtaaaaataactggacattgttatcatatccaggtgcaggtcatttgattgaaccaccatactctccattatgttgtgcttcaactacacatgatttgagattacattggggtggtgaagttattccacatgctgcagctcaagaacatgcttggaaggaaatccaaagatttttgagaaagcatttgatcccagatgttacttcacaattataa

SEQ ID NO: 233 - protein, 420 aa, Mus musculus
MAKLTAVPLSALVDEPVHIQVTGLAPFQVVCLQASLKDEKGNLFSSQAFYRASEVGEVDLEHDPSLGGDYMGVHPMGLFWSLKPEKLLGRLIKRDVMNSPYQIHIKACHPYFPLQDIVVSPPLDSLTLERWYVAPGVKRIQVKESRIRGALFLPPGEGPFPGVIDLFGGAGGLMEFRASLLASRGFATLALAYWNYDDLPSRLEKVDLEYFEEGVEFLLRHPKVLGPGVGILSVCIGAEIGLSMAINLKQIRATVLINGPNFVSQSPHVYHGQVYPPVPSNEEFVVTNALGLVEFYRTFQETADKDSKYCFPIEKAHGHFLFVVGEDDKNLNSKVHANQAIAQLMKNGKKNWTLLSYPGAGHLIEPPYTPLCQASRMPILIPSLSWGGEVIPHAAAQEHSWKEIQKFLKQHLLPDLSSQL

SEQ ID NO: 234 - DNA, 1263 bp, Mus musculus
atggcaaaattgactgctgttccattgtctgctttagttgatgaaccagttcatattcaagttacaggtttggcaccatttcaagttgtttgtttgcaagcttcattgaaggatgaaaagggtaatttgttttcttcacaagcattctacagagcttctgaagttggtgaagtcgatttggaacatgatccatcattgggtggtgactacatgggtgttcatccaatgggtttgttttggtctttgaagccagaaaagttgttgggtagattgattaaaagagatgttatgaactcaccataccaaatccatatcaaggcttgtcatccatactttccattgcaagatattgttgtttctccaccattagattcattgactttggaaagatggtatgttgcaccaggtgttaagagaattcaagttaaggaatctagaattagaggtgctttgtttttaccaccaggtgaaggtccatttccaggtgttattgatttgtttggtggtgcaggtggtttaatggaattcagagcatctttgttagcttcaagaggttttgctacattggcattagcttattggaattacgatgatttgccatcaagattggaaaaggttgatttggaatacttcgaagaaggtgttgaattcttgttgagacatccaaaggttttgggtccaggtgttggtattttatctgtttgtatcggtgcagaaatcggtttgtcaatggctattaatttgaagcaaatcagagcaactgttttgattaatggtccaaacttcgtttctcaatcaccacatgtttatcatggtcaagtttacccaccagttccatctaacgaagaattcgttgttacaaacgctttgggtttagttgaattctacagaactttccaagaaacagcagataaggattctaagtactgtttcccaatcgaaaaggctcatggtcatttcttgtttgttgttggtgaagatgataagaatttgaactcaaaggttcatgctaaccaagcaatcgctcaattgatgaagaacggtaaaaagaattggactttgttatcttatccaggtgcaggtcatttgattgaaccaccatacacaccattatgtcaagcttcaagaatgccaattttgattccatctttatcatggggtggtgaagttattccacatgctgcagctcaagaacattcttggaaggaaatccaaaagttcttgaagcaacatttgttaccagatttgtcttcacaattataa

SEQ ID NO: 235 - protein, 420 aa, Rattus norvegicus
MAKLTAVPLSALVDEPVHIRVTGLTPFQVVCLQASLKDDKGNLFNSQAFYRASEVGEVDLERDSSLGGDYMGVHPMGLFWSMKPEKLLTRLVKRDVMNRPHKVHIKLCHPYFPVEGKVISSSLDSLILERWYVAPGVTRIHVKEGRIRGALFLPPGEGPFPGVIDLFGGAGGLFEFRASLLASHGFATLALAYWGYDDLPSRLEKVDLEYFEEGVEFLLRHPKVLGPGVGILSVCIGAEIGLSMAINLKQITATVLINGPNFVSSNPHVYRGKVFQPTPCSEEFVTTNALGLVEFYRTFEETADKDSKYCFPIEKAHGHFLFVVGEDDKNLNSKVHAKQAIAQLMKSGKKNWTLLSYPGAGHLIEPPYSPLCSASRMPFVIPSINWGGEVIPHAAAQEHSWKEIQKFLKQHLNPGFNSQL

SEQ ID NO: 236 - DNA, 1263 bp, Rattus norvegicus
atggcaaaattgactgctgttccattgtcagcattagttgatgaaccagttcatattagagttactggtttgacaccatttcaagttgtttgtttgcaagcttctttgaaggatgataagggtaatttgtttaattcacaagcattctacagagcttctgaagttggtgaagtcgatttggaaagagattcttcattgggtggtgactacatgggtgttcatccaatgggtttgttttggtctatgaagccagaaaagttgttgactagattagttaagagagatgttatgaacagaccacataaggttcatatcaagttgtgtcatccatacttcccagttgagggtaaagttatttcttcatctttggattctttgattttagaaagatggtatgttgcaccaggtgttacaagaattcatgttaaggaaggtagaattagaggtgctttgtttttaccaccaggtgaaggtccatttccaggtgttattgatttgtttggtggtgcaggtggtttatttgaattcagagcatcattgttagcttctcatggttttgctacattggcattagcttattggggttacgatgatttgccatctagattggaaaaggttgatttggaatacttcgaagaaggtgttgaattcttgttgagacatccaaaggttttgggtccaggtgttggtattttatcagtttgtatcggtgcagaaatcggtttgtctatggctattaatttgaagcaaatcactgcaacagttttgattaatggtccaaacttcgtttcatctaacccacatgtttaccgtggtaaagtttttcaaccaactccatgttcagaagaattcgttactacaaacgctttgggtttagttgaattctacagaactttcgaagaaacagcagataaggattctaagtactgtttcccaatcgaaaaggctcatggtcatttcttgtttgttgttggtgaagatgataagaatttgaactcaaaggttcatgctaagcaagcaatcgctcaattgatgaagtcaggtaaaaagaattggacattgttgtcttatccaggtgcaggtcatttgattgaaccaccatactcaccattatgttcagcttctagaatgccattcgttatcccatctattaattggggtggtgaagttattccacatgctgcagctcaagaacattcatggaaggaaatccaaaagttcttgaagcaacatttgaacccaggttttaattctcaattataa

SEQ ID NO: 237 - protein, 626 aa, Ralstonia pickettii
MGTFALSVTPADDLIDVSRGIVVTGLAPGTQVGIVAQTRRGNDVLWHSRAAFVADAQGTVDLTRDAPVSGDYAGVSAMGIVWSQRPEDGKAREVFPQPVAEPLTTTLTATANGESVHASFVQRLAAPGVTRHDVRDDGLVGTLYLPDPYAHPGPRPAVLILNGSGGGINEPRAALYASHGYAAFALAYFKAPGLPDYISNTPLEYFERALAWLRKRVEPLHDFVAVSGQSRGGELALLLGATFPEAVSAVIGYVPGAVVHSGQNAADPAVGREGPTWLYRGQPLPHLWEGNRTASWAPFDEGPAPHRHERAIRTALQDTDAVARARIRIERARGPVLLLSATDDGSWPSSDYSRMVTTKLAEVRHPYPVQHFDYEGAGHAIVFPYVPTTQLVYAHPVSGRISTGGGEPRANARADAQSWAAVLRFLASAVAARGASVPDSRSLSSMDFTPAHDVADQVAGLDDGSPTHALRHAREKVATATQGSYNALFDAGLPGLTLGERLLVALYACRLTPAPELAEHYRARLASTPVDADALQAVDHGDIDTLTDARLRAILTFTRTLVERPIEGDRDALLRLPAAGLATADVVTLAQLIAFLSYQTRLVAGLRALREAAGSGSATASTETAA

SEQ ID NO: 238 - DNA, 1881 bp, Ralstonia pickettii
atgggtacttttgctttgtcagttacaccagcagatgatttgattgatgtttctagaggtattgttgttactggtttggctccaggtacacaagttggtattgttgcacaaactagacgtggtaatgatgttttgtggcattctagagctgcatttgttgctgatgcacaaggtactgttgatttgacaagagatgctccagtttctggtgactatgcaggtgtttcagctatgggtattgtttggtctcaaagaccagaagatggtaaagctagagaagtttttccacaaccagttgcagaaccattgactacaactttaacagctactgcaaatggtgaatctgttcatgcttcatttgttcaaagattggctgcaccaggtgttactagacatgatgttagagatgatggtttagttggtacattgtatttgccagatccatacgctcatccaggtccaagaccagcagttttgattttaaatggttctggtggtggtattaatgaaccaagagctgcattgtatgcttctcatggttacgctgcatttgctttggcatactttaaagctccaggtttaccagattacatctctaacactccattagaatactttgaaagagctttggcatggttaagaaaaagagttgaaccattgcatgattttgttgctgtttctggtcaatcaagaggtggtgaattagctttgttattgggtgcaacatttccagaagcagtttcagctgttattggttatgttccaggtgctgttgttcattctggtcaaaatgctgcagatccagctgttggtagagaaggtccaacttggttgtacagaggtcaaccattgccacatttgtgggaaggtaatagaacagcatcatgggctccatttgatgaaggtccagctccacatagacatgaaagagcaattagaactgctttacaagatacagatgctgttgcaagagctagaattagaattgaaagagctagaggtccagttttattgttatctgcaactgatgatggttcatggccatcttcagattactctagaatggttacaactaagttggctgaagttagacatccatatccagttcaacattttgattacgaaggtgcaggtcatgctattgtttttccatatgttccaacaactcaattagtttacgctcatccagtttctggtagaatttcaactggtggtggtgaaccaagagcaaatgctagagcagatgctcaatcatgggctgcagttttgagatttttagcatcagctgttgctgcaagaggtgcttctgttccagattctagatcattgtcttcaatggatttcactccagcacatgatgttgctgatcaagttgcaggtttggatgatggttcaccaacacatgctttaagacatgcaagagaaaaagttgcaacagctactcaaggttcttataatgctttgtttgatgcaggtttaccaggtttgactttaggtgaaagattgttagttgcattgtatgcttgtagattaacaccagctccagaattggcagaacattacagagcaagattagcttctactccagttgatgcagatgctttgcaagctgttgatcatggtgacattgatacattaactgatgctagattgagagcaatcttgacttttactagaacattagttgaaagaccaattgaaggtgacagagatgctttgttaagattgccagctgcaggtttagcaactgctgatgttgttacattggctcaattgatcgcatttttgtcataccaaactagattagttgctggtttgagagcattaagagaagctgcaggttctggttcagcaacagcttctactgaaacagctgcataa

SEQ ID NO: 239 - protein, 461 aa, Bos taurus
MSTQEQTPQICVVGSGPAGFYTAQHLLKHHSRAHVDIYEKQLVPFGLVRFGVAPDHPEVKNVINTFTQTARSDRCAFYGNVEVGRDVTVQELRDAYHAVVLSYGAEDHQALDIPGEELPGVFSARAFVGWYNGLPENRELAPDLSCDTAVILGQGNVALDVARILLTPPDHLEKTDITEAALGALRQSRVKTVWIVGRRGPLQVAFTIKELREMIQLPGTRPMLDPADFLGLQDRIKEAARPRKRLMELLLRTATEKPGVEEAARRASASRAWGLRFFRSPQQVLPSPDGRRAAGIRLAVTRLEGIGEATRAVPTGDVEDLPCGLVLSSIGYKSRPIDPSVPFDPKLGVVPNMEGRVVDMPGLYCSGWVKRGPTGVITTTMTDSFLTGQILLQDLKAGHLPSGPRPGSTFIKALLDSRGAWPVSFSDWEKLDAEEVSRGQASGKPREKLLDPQEMLRLLGH

SEQ ID NO: 240 - DNA, 1386 bp, Bos taurus
atgtccacacaggagcagaccccccagatctgtgtggtgggcagtggcccagctggcttttacacggcccagcacctgctaaagcaccactcccgggcccacgtggatatctacgagaaacagctggtgcccttcggcctggtgcgctttggtgtggcgcctgaccaccccgaggtcaagaatgttatcaacacctttacccagacggcccgctctgaccgctgtgccttctatggcaacgtggaggtgggcagggatgtgactgtgcaggagctgcgggacgcctaccacgccgtggtgctgagctatggggcagaggaccatcaggccctggatatccctggtgaggagttgcccggcgtgttctcggcccgggcctttgtgggctggtacaatgggcttcctgagaaccgggagctggccccggacctgagctgtgacacagccgtgattctggggcaggggaatgtggctctggacgtggcccggatcctgctgaccccccccgaccacctggagaaaacggacatcactgaggccgccctgggagccctgagacagagtcgggtgaagacggtgtggatcgtgggccgacgtggacccctacaagtggccttcaccataaaggagcttcgggagatgattcagttaccaggaactcggcccatgttggatcctgcggatttcttgggtctccaggacagaatcaaggaggccgctcgcccgaggaagcggctgatggaactgctgcttcgaacagccacggagaagccaggggtggaggaggctgcccgccgggcatcagcctcccgtgcctggggcctccgcttcttccgaagcccacagcaggtcctgccctcgccagatgggcggcgggcggcaggcatccgcctggcagtcaccagactggagggcattggagaggccacccgggcagtgcccactggggatgtggaggacctcccctgtgggctggtgctgagcagcattgggtataagagccgccccatcgaccccagtgtgccctttgaccccaagctcggggtcgtccccaatatggagggccgggttgtggatatgccaggcctctactgcagcggctgggtgaagcggggacccacaggtgtcatcaccaccaccatgaccgacagcttcctcactggccagattctgctacaggacctgaaggccgggcacctgccgtctggccccaggccgggctctacattcatcaaggccctgctggacagccgaggggcctggcccgtgtctttctcggactgggagaaactggatgctgaggaggtgtcccggggccaggcctcggggaagcccagagagaagctgctggatcctcaggagatgctgcggctgctggggcactga

SEQ ID NO: 241 - protein, 129 aa, Bos taurus
MSSSEDKITVHFINRDGETLTTKGKIGDSLLDVVVQNNLDIDGFGACEGTLACSTCHLIFEQHIFEKLEAITDEENDMLDLAYGLTDRSRLGCQICLTKAMDNMTVRVPDAVSDARESIDMGMNSSKIE

SEQ ID NO: 242 - DNA, 390 bp, Bos taurus
atgagcagctcagaagataaaataacagtccactttataaaccgtgatggtgaaacattaacaaccaaaggaaaaattggtgactctctgctagatgttgtggttcaaaataatctagatattgatggttttggtgcatgtgagggaaccttggcttgttctacctgtcacctcatctttgaacagcacatatttgagaaattggaagcaatcactgatgaggagaatgacatgcttgatctggcatatggactaacagatagatcgcggttgggctgccagatctgtttgacaaaggctatggacaatatgactgttcgagtacctgatgccgtgtctgatgccagagagtccattgatatgggcatgaactcctcaaagatagaataa

SEQ ID NO: 243 - protein, 129 aa, Danio rerio
MLRAEEKVTVHFLNRDGKRITVKASIGESLLDVVVDRDLDIDGFGACEGTLACSTCHLIFEEDVYKKLGPVSDEEMDMLDLAYGLTDTSRLGCQVCLRKDLDGMILRVPDVISDARADSEKESSTAPPK

SEQ ID NO: 244 - DNA, 390 bp, Danio rerio
atgttaagagctgaagagaaagttactgttcatttcttgaatagggatggtaagagaatcactgttaaggcttcaatcggtgaatcattattggacgttgtcgtagatagagacttggacatagatggttttggtgcttgtgaaggaacattggcttgttctacttgtcacttaatattcgaggaagatgtctataagaaattaggtccagtctcagatgaggaaatggatatgttagacttggcttatggtttaactgatacctctaggttaggttgccaagtatgtttaagaaaggacttagatggtatgatattgagagttccagacgttatttcagatgcaagagctgattcagagaaggagtcttctactgcaccaccaaaatga

SEQ ID NO: 245 - protein, 124 aa, Homo sapiens
MSSSEDKITVHFINRDGETLTTKGKVGDSLLDVVVENNLDIDGFGACEGTLACSTCHLIFEDHIYEKLDAITDEENDMLDLAYGLTDRSRLGCQICLTKSMDNMTVRVPETVADARQSIDVGKT

SEQ ID NO: 246 - DNA, 375 bp, Homo sapiens
atgtcatcatcagaagataagattactgtccattttatcaacagagatggtgaaactttgactaccaaaggtaaagtaggagactcattattagacgtagtcgtcgaaaataatttggatatagatggtttcggtgcttgtgaaggaacattggcatgttctacctgtcacttaatattcgaggaccacatttatgagaagttagatgctattaccgatgaagaaaatgatatgttagatttggcttacggtttgacagatagatcaagattgggatgtcaaatctgcttgactaaatctatggataatatgactgttagggttccagaaacagtcgcagatgctagacagtcaatagatgttggaaaaacttga

SEQ ID NO: 247 - protein, 124 aa, Mus musculus
MSSSEDKITVHFKNRDGETLTTKGKIGDSLLDVVIENNLDIDGFGACEGTLACSTCHLIFEDHIYEKLDAITDEENDMLDLAFGLTDRSRLGCQVCLTKAMDNMTVRVPEAVADVRQSVDMSKN

SEQ ID NO: 248 - DNA, 375 bp, Mus musculus
atgtcttcatcagaagacaagataaccgttcacttcaaaaacagagacggtgagacattgactaccaagggtaagatcggtgattcattattagacgttgtcattgaaaataatttagatattgatggtttcggagcatgtgaaggaacattggcatgttctacctgtcacttgatcttcgaggatcatatatacgaaaaattggacgcaattacagatgaggagaacgatatgttagacttggcctttggattaactgataggtctagattgggttgccaggtttgtttgactaaagcaatggacaacatgactgtaagagttccagaagccgttgcagacgttagacaatctgtagatatgtctaaaaattga

SEQ ID NO: 249 - protein, 128 aa, Sus scrofa
MSSSEDKITVHFINRDGKTLTTQGKVGDSLLDVVIENNLDIDGFGACEGTLACSTCHLIFEDHIFEKLEAITDEENDMLDLAYGLTDRSRLGCQICLTKAMDNMTVRVPEAVADARESIDLGKNSSKL

SEQ ID NO: 250 - DNA, 387 bp, Sus scrofa
atgtcatcatcagaagataaaattactgttcactttataaacagagacggtaagaccttgacaactcaaggtaaggtaggtgattcattattagatgttgttatagagaataacttagacatcgacggttttggtgcttgtgaaggtactttggcttgttctacttgtcatttgatttttgaagaccatatctttgaaaaattggaagctattactgatgaagagaatgatatgttggacttagcctacggattgactgatagatctagattgggttgtcagatatgtttaacaaaggcaatggataatatgacagtcagagtcccagaggctgtcgctgacgcaagagagtcaatagacttaggtaaaaattcatctaaattgtga

SEQ ID NO: 251 - protein, 124 aa, Monodelphis domestica
MRSSEDKVTIHFVNRDGEKLTTQGKVGDTLLDIVVNNNLDIDGFGACEGTLACSTCHLVFEEHIFGKLEAITDEENDMLDLAYGLTDTSRLGCQICLTKSMNNMTVRVPEAVADARQSIDLGKN

SEQ ID NO: 252 - DNA, 375 bp, Monodelphis domestica
atgagatcatctgaagacaaagtcaccatccattttgtcaacagagacggagaaaagttgaccacccaaggtaaagttggtgataccttgttggatattgtcgtcaataataatttagatatagacggttttggtgcttgtgaaggtactttagcttgctctacttgtcatttagtttttgaagaacacatttttggtaaattggaagctattaccgatgaagaaaacgatatgttagacttagcttacggtttgactgatacatcaagattgggttgccaaatatgcttaactaaatcaatgaataacatgactgttagggttccagaagcagttgcagacgctagacaatctattgatttaggaaagaactga

SEQ ID NO: 253 - protein, 124 aa, Ailuropoda melanoleuca
MSSSEDKITVHFVNRDGETLTAKGRVGDSLLDVVIENNLDIDGFGACEGTLACSTCHLIFEEHIFEKLEAVTDEENDMLDLAYGLTDRSRLGCQIYLTKSMDNMTVRVPDVVADARQSMDVGKN

SEQ ID NO: 254 - DNA, 375 bp, Ailuropoda melanoleuca
atgtcatcttcagaagataaaataaccgtacatttcgtcaatagggatggtgagaccttgacagcaaaaggtagggtaggtgattcattattggatgtagtcattgagaacaatttagatattgacggatttggagcttgtgaaggtactttggcatgttcaacatgtcacttgatcttcgaggaacatatttttgaaaaattggaagctgttacagacgaagagaatgatatgttggatttggcttatggattgacagataggtctagattaggttgtcaaatatacttgactaaatcaatggataatatgacagtcagagtacctgatgttgtagctgacgccaggcaatctatggatgtcggtaagaactga

SEQ ID NO: 255 - protein, 123 aa, Numida meleagris
MSSEDKITVHFINRDGDKLTAKGKPGDSLLDVVVDNNLDIDGFGACEGTLACSTCHLIFEDHIFEKLDAITDEEMDMLDLAYGLTETSRLGCQICLKKSMDNMTVRVPEAVADARQSVDLSKN

SEQ ID NO: 256 - DNA, 372 bp, Numida meleagris
atgtcatcagaagataagattacagtacatttcattaatagggacggtgacaaattaaccgctaaaggaaaaccaggagactcattattagatgttgttgtagacaataatttagatatagatggtttcggagcttgtgagggtacattagcatgttcaacatgccacttaatctttgaagatcacatatttgaaaaattagatgctattacagatgaggaaatggacatgttggatttagcctatggtttaactgagacttcaagattaggttgtcagatttgcttgaaaaagtctatggataatatgactgtcagagttccagaagctgtagctgatgcaagacagtcagtagatttatcaaagaactga

SEQ ID NO: 257 - protein, 124 aa, Cavia porcellus
MSSSEDKITIHFINRDGEKLTTQGKIGDSLLDVVVENNLDIDGFGACEGTLACSTCHLIFEDHIYEKLDAITDEENDMLDLAYGLTDRSRLGCQIYLTKSMDNMTVRVPDAVADARQSVDVGKN

SEQ ID NO: 258 - DNA, 375 bp, Cavia porcellus
atgtcttcttcagaagataagattactattcactttatcaatagagacggagaaaagttgacaacccaaggtaagattggagattctttgttagacgttgtcgtagagaataatttagacattgatggttttggagcctgcgaaggaaccttagcttgttctacctgtcatttgattttcgaggatcacatctatgagaagttagatgcaattaccgacgaggagaatgacatgttagatttagcctatggtttaaccgacagatcaaggttaggttgtcagatctacttgactaaatctatggataacatgactgttagggttccagatgccgttgcagatgctagacagtctgttgacgttggtaaaaactga

SEQ ID NO: 259 - protein, 124 aa, Otolemur garnetti
MSSSEDKVTVHFVNRDGETITAKGKVGDSLLDVVVENNLDIDGFGACEGTLACSTCHLIFEEHIFEKLDAITDEENDMLDLAFGLTDRSRLGCQVCLTKSMDNMTVRVPEAVADARQSMDMGKT

SEQ ID NO: 260 - DNA, 375 bp, Otolemur garnetti
atgtcttcttctgaggataaggtcacagttcattttgtaaacagagacggagaaacaataacagctaaaggaaaagttggtgattcattgttagatgtcgttgtagaaaataacttggatattgacggttttggtgcatgtgaaggtacattagcctgctcaacatgccacttgatttttgaagaacatattttcgagaaattggacgccataactgacgaggaaaatgatatgttagatttggccttcggtttgacagatagatctagattgggttgccaagtttgtttaactaaatcaatggataacatgactgttagagtaccagaagccgttgctgatgcaagacagtctatggatatgggtaagacttga

SEQ ID NO: 261 - protein, 122 aa, Xiphophorus maculatus
MLRSDSKVTVHFINRDGEKITAKASPGDSLLDVVINEDLDFDGFGACEGTLACSTCHLIFDEEMYKKLGPVTDEEMDMLDLAYGLTETSRLGCQICLTKSLEGMVARVPESVADIRQTKDGS

SEQ ID NO: 262 - DNA, 369 bp, Xiphophorus maculatus
atgttgaggtctgattcaaaggttactgttcattttatcaatagagacggtgagaagatcacagctaaagcctcacctggtgattcattattagatgttgtaattaacgaagatttggatttcgatggatttggtgcttgcgagggaacattggcctgctctacctgccatttgatatttgatgaagaaatgtacaagaagttgggaccagtaacagacgaagagatggacatgttggatttagcttatggtttaacagaaacttcaagattgggatgtcaaatctgtttgaccaagtctttagaaggtatggtagcaagagttcctgaatctgttgccgatattagacagacaaaggatggatcttga

SEQ ID NO: 263 - protein, 526 aa, Saccharomyces cerevisiae
MADQLVKTEVTKKSFTAPVQKASTPVLTNKTVISGSKVKSLSSAQSSSSGPSSSSEEDDSRDIESLDKKIRPLEELEALLSSGNTKQLKNKEVAALVIHGKLPLYALEKKLGDTTRAVAVRRKALSILAEAPVLASDRLPYKNYDYDRVFGACCENVIGYMPLPVGVIGPLVIDGTSYHIPMATTEGCLVASAMRGCKAINAGGGATTVLTKDGMTRGPVVRFPTLKRSGACKIWLDSEEGQNAIKKAFNSTSRFARLQHIQTCLAGDLLFMRFRTTTGDAMGMNMISKGVEYSLKQMVEEYGWEDMEVVSVSGNYCTDKKPAAINWIEGRGKSVVAEATIPGDVVRKVLKSDVSALVELNIAKNLVGSAMAGSVGGFNAHAANLVTAVFLALGQDPAQNVESSNCITLMKEVDGDLRISVSMPSIEVGTIGGGTVLEPQGAMLDLLGVRGPHATAPGTNARQLARIVACAVLAGELSLCAALAAGHLVQSHMTHNRKPAEPTKPNNLDATDINRLKDGSVTCIKS

SEQ ID NO: 264 - DNA, 1581 bp, Saccharomyces cerevisiae
atggcagaccaattggtgaaaactgaagtcaccaagaagtcttttactgctcctgtacaaaaggcttctacaccagttttaaccaataaaacagtcatttctggatcgaaagtcaaaagtttatcatctgcgcaatcgagctcatcaggaccttcatcatctagtgaggaagatgattcccgcgatattgaaagcttggataagaaaatacgtcctttagaagaattagaagcattattaagtagtggaaatacaaaacaattgaagaacaaagaggtcgctgccttggttattcacggtaagttacctttgtacgctttggagaaaaaattaggtgatactacgagagcggttgcggtacgtaggaaggctctttcaattttggcagaagctcctgtattagcatctgatcgtttaccatataaaaattatgactacgaccgcgtatttggcgcttgttgtgaaaatgttataggttacatgcctttgcccgttggtgttataggccccttggttatcgatggtacatcttatcatataccaatggcaactacagagggttgtttggtagcttctgccatgcgtggctgtaaggcaatcaatgctggcggtggtgcaacaactgttttaactaaggatggtatgacaagaggcccagtagtccgtttcccaactttgaaaagatctggtgcctgtaagatatggttagactcagaagagggacaaaacgcaattaaaaaagcttttaactctacatcaagatttgcacgtctgcaacatattcaaacttgtctagcaggagatttactcttcatgagatttagaacaactactggtgacgcaatgggtatgaatatgatttctaaaggtgtcgaatactcattaaagcaaatggtagaagagtatggctgggaagatatggaggttgtctccgtttctggtaactactgtaccgacaaaaaaccagctgccatcaactggatcgaaggtcgtggtaagagtgtcgtcgcagaagctactattcctggtgatgttgtcagaaaagtgttaaaaagtgatgtttccgcattggttgagttgaacattgctaagaatttggttggatctgcaatggctgggtctgttggtggatttaacgcacatgcagctaatttagtgacagctgttttcttggcattaggacaagatcctgcacaaaatgttgaaagttccaactgtataacattgatgaaagaagtggacggtgatttgagaatttccgtatccatgccatccatcgaagtaggtaccatcggtggtggtactgttctagaaccacaaggtgccatgttggacttattaggtgtaagaggcccgcatgctaccgctcctggtaccaacgcacgtcaattagcaagaatagttgcctgtgccgtcttggcaggtgaattatccttatgtgctgccctagcagccggccatttggttcaaagtcatatgacccacaacaggaaacctgctgaaccaacaaaacctaacaatttggacgccactgatataaatcgtttgaaagatgggtccgtcacctgcattaaatcctaa

SEQ ID NO: 265 - protein, 501 aa, Homo sapiens
MVLWGPVLGALLVVIAGYLCLPGMLRQRRPWEPPLDKGTVPWLGHAMAFRKNMFEFLKRMRTKHGDVFTVQLGGQYFTFVMDPLSFGSILKDTQRKLDFGQYAKKLVLKVFGYRSVQGDHEMIHSASTKHLRGDGLKDLNETMLDSLSFVMLTSKGWSLDASCWHEDSLFRFCYYILFTAGYLSLFGYTKDKEQDLLQAGELFMEFRKFDLLFPRFVYSLLWPREWLEVGRLQRLFHKMLSVSHSQEKEGISNWLGNMLQFLREQGVPSAMQDKFNFMMLWASQGNTGPTSFWALLYLLKHPEAIRAVREEATQVLGEARLETKQSFAFKLGALQHTPVLDSVVEETLRLRAAPTLLRLVHEDYTLKMSSGQEYLFRHGDILALFPYLSVHMDPDIHPEPTVFKYDRFLNPNGSRKVDFFKTGKKIHHYTMPWGSGVSICPGRFFALSEVKLFILLMVTHFDLELVDPDTPLPHVDPQRWGFGTMQPSHDVRFRYRLHPTE

SEQ ID NO: 266 - DNA, 1506 bp, Homo sapiens
atggttttgtggggtccagttttaggtgctttgttagttgttattgcaggttatttgtgtttgccaggcatgttgagacaaagaagaccatgggaaccaccattggataaaggtactgttccatggttaggtcatgctatggcttttagaaagaatatgttcgaattcttgaaaagaatgagaactaaacatggtgacgtttttacagttcaattaggtggtcaatacttcactttcgttatggacccattgtcatttggttctatcttgaaggatacacaaagaaagttggatttcggtcaatacgctaagaaattggttttgaaggttttcggttacagatctgttcaaggtgaccatgaaatgatccattctgcatcaacaaagcatttgagaggtgacggtttgaaggatttgaacgaaactatgttggattctttgtcattcgttatgttgacatcaaaaggttggtctttagatgcatcatgttggcatgaagattctttgtttagattctgttactacatcttgtttactgctggttatttgtcattgttcggttacacaaaggataaggaacaagatttgttacaagctggtgaattgtttatggaattcagaaagttcgatttgttatttccaagatttgtttattctttgttatggccaagagaatggttggaagttggtagattgcaaagattgttccataagatgttgtctgtttcacattctcaagaaaaggaaggtatctctaactggttgggtaacatgttgcaattcttgagagaacaaggtgttccatcagctatgcaggataagtttaatttcatgatgttgtgggcatctcaaggtaatactggtccaacatcattctgggctttgttgtacttgttgaagcatccagaagctatcagagcagttagagaagaagctactcaagttttgggtgaagcaagattggaaacaaagcaatctttcgcttttaaattgggtgcattacaacatactccagttttggattcagttgttgaagaaactttgagattgagagctgcaccaacattgttaagattggttcatgaagattacacattgaagatgtcttcaggtcaagaatacttgtttagacatggtgacatcttggctttgttcccatatttgtctgttcatatggacccagatatccatccagaaccaactgtttttaaatacgatagatttttaaacccaaacggttcaagaaaggttgatttctttaagactggtaaaaagattcatcattacacaatgccatggggttcaggtgtttctatttgtccaggtagatttttcgctttgtctgaggttaagttgtttattttgttgatggttactcatttcgatttggaattagttgatccagatacaccattgccacatgttgatccacaaagatggggttttggtactatgcaaccatcacatgatgttagattcagatacagattacatccaacagaataa

SEQ ID NO: 267 - protein, 500 aa, Oryctolagus cuniculus
MVLWGLLGALLMVMVGWLCLPGLLRQRRPQEPPLDKGSIPWLGHAMTFRKNMLEFLKHMRSKHGDVFTVQLGGQYFTFVMDPVSFGPILKDGQRKLDFVEYAKGLVLKVFGYQSIEGDHRMIHLASTKHLMGHGLEELNKAMLDSLSLVMLGPEGRSPDASRWHEDGLFHFCYGVMFKAGYLSLFGHTSDKRQDLLQAEEIFIKFRRFDLLFPRFVYSLLGPREWREVGRLQQLFHELLSVKHNPEKDGMSNWIGHMLQYLSEQGVAPAMQDKFNFMMLWASQGNTGPASFWALIYLLKHPEAMRAVKEEATRVLGEPRLEAKQSFTVQLSALQHIPVLDSVMEETLRLGAAPTLYRVVQKDILLKMASGQECLLRQGDIVTLFPYLSVHMDPDIHPEPTTFKYDRFLNPNGSRKVDFYKAGQKIHHYTMPWGSGVSICPGRFFALSEMKLFVLLMVQYFDLELVDPNTPVPPIDPRRWGFGTMQPTHDVRIRYRLKPLE

SEQ ID NO: 268 - DNA, 1503 bp, Oryctolagus cuniculus
atggttttgtggggtttgttaggtgcattgttaatggttatggttggttggttgtgtttaccaggtttgttaagacaaagaagaccacaagaaccaccattggataaaggttcaattccatggttaggtcatgctatgacttttagaaagaatatgttggaattcttgaaacatatgagatctaaacatggtgacgtttttactgttcaattaggtggtcaatacttcacattcgttatggacccagtttcttttggtccaattttgaaagatggtcaaagaaagttggatttcgttgaatacgctaagggtttggttttgaaggttttcggttaccaatcaatcgaaggtgaccatagaatgatccatttggcttctactaagcatttgatgggtcatggtttggaagaattgaataaggcaatgttggattctttgtcattagttatgttaggtccagaaggtagatctccagatgcttcaagatggcatgaagatggtttgttccatttctgttacggtgttatgttcaaggcaggttacttgtctttgttcggtcatacatcagataagagacaagatttgttgcaagctgaagaaattttcattaagtttagaagattcgatttgttatttccaagatttgtttattctttgttaggtccaagagaatggagagaagttggtagattgcaacaattgttccatgaattgttgtctgttaagcataacccagaaaaggatggcatgtcaaactggatcggtcatatgttgcaatatttgtctgaacaaggtgttgctccagcaatgcaggataagtttaatttcatgatgttgtgggcatctcaaggtaatactggtccagcttcattctgggcattgatatatttgttgaagcatccagaagctatgagagcagttaaagaagaagctactagagttttgggtgaaccaagattggaagctaagcaatcttttacagttcaattgtcagcattacaacatattccagttttggattctgttatggaagaaactttgagattaggtgctgcaccaacattatacagagttgttcaaaaggatatcttgttgaagatggcttcaggtcaagaatgtttgttaagacaaggtgacatcgttacattgttcccatatttgtctgttcatatggacccagatatccatccagaaccaactacttttaaatacgatagatttttaaatccaaacggttctagaaaggttgatttctacaaggcaggtcaaaagattcatcattacactatgccatggggttctggtgtttcaatttgtccaggtagatttttcgctttgtcagaaatgaagttgttcgttttgttgatggttcaatactttgatttggaattagttgatccaaatacaccagttccaccaattgatccaagaagatggggttttggtactatgcaaccaacacatgatgttagaattagatacagattgaaaccattagaataa

SEQ ID NO: 269 - protein, 500 aa, Mus musculus
MTLWCTVLGALLTVVGCLCLSLLLRHRRPWEPPLDKGFVPWLGHSMAFRKNMFEFLKGMRAKHGDVFTVQLGGQYFTFVMDPLSFGPIIKNTEKALDFQSYAKELVLKVFGYQSVDGDHRMIHLASTKHLMGQGLEELNQAMLDSLSLVMLGPKGSSLGASSWCEDGLFHFCYRILFKAGFLSLFGYTKDKQQDLDEADELFRKFRRFDFLFPRFVYSLLGPREWVEVSQLQRLFHQRLSVEQNLEKDGISCWLGYMLQFLREQGIASSMQDKFNFMMLWASQGNTGPTCFWVLLFLLKHQDAMKAVREEATRVMGKARLEAKKSFTFTPSALKHTPVLDSVMEESLRLCATPTLLRVVQEDYVLKMASGQEYQIRRGDKVALFPYLSVHMDPDIHPEPTAFKYDRFLNPDGTRKVDFYKSGKKIHHYSMPWGSGVSKCPGRFFALSEMKTFVLLMIMYFDFKLVDPDIPVPPIDPRRWGFGTSQPSHEVRFLYRLKPVQ

SEQ ID NO: 270 - DNA, 1503 bp, Mus musculus
atgactttatggtgtacagttttgggtgctttgttgactgttgttggttgtttgtgtttgtctttgttgttgagacatagaagaccatgggaaccaccattagataaaggttttgttccatggttgggtcattcaatggcttttagaaagaatatgttcgaattcttgaagggtatgagagcaaaacatggtgacgtttttactgttcaattaggtggtcaatacttcacattcgttatggacccattgtctttcggtccaattattaagaatactgaaaaggctttggatttccaatcatacgcaaaggaattagttttgaaagtttttggttaccaatctgttgatggtgaccatagaatgatccatttggcttcaacaaagcatttgatgggtcaaggtttggaagaattgaaccaagcaatgttggattctttgtcattggttatgttgggtccaaaaggttcttcattgggtgcttcttcatggtgtgaagatggtttgttccatttctgttacagaattttgtttaaagcaggtttcttgtctttgttcggttacacaaaggataagcaacaagatttggatgaagctgatgaattgtttagaaagtttagaagattcgatttcttgttcccaagattcgtttactctttgttgggtccaagagaatgggttgaagtttcacaattgcaaagattgttccatcaaagattgtctgttgaacaaaatttggaaaaggatggtatctcatgttggttgggttacatgttgcaattcttgagagaacaaggtatcgcttcttcaatgcaggataagtttaatttcatgatgttgtgggcatctcaaggtaatactggtccaacatgtttctgggttttgttgtttttattgaaacatcaagatgctatgaaagcagttagagaagaagctactagagttatgggtaaagctagattggaagctaagaaatcttttacttttactccatcagcattgaagcatacaccagttttggattctgttatggaagaatcattgagattgtgtgctactccaacattgttgagagttgttcaagaagattacgttttgaagatggcttctggtcaagaataccaaattagaagaggtgacaaggttgcattgttcccatatttgtcagttcatatggacccagatattcatccagaaccaactgcttttaaatacgatagatttttgaatccagatggtacaagaaaggttgatttctacaagtctggtaaaaagattcatcattactcaatgccatggggttctggtgtttcaaaatgtccaggtagatttttcgctttatctgaaatgaaaacttttgttttgttgatgatcatgtacttcgatttcaaattggttgatccagatattccagttccaccaattgatccaagaagatggggttttggtacatctcaaccatcacatgaagttagatttttatacagattgaaaccagttcaataa

SEQ ID NO: 271 - protein, 501 aa, Sus scrofa
MVLWGPVLGVLLVAIVGYLCLQGLLRQRRPEEPPLDKGSVPWLGHAMTFRKNMLEFLKHMWARHGDIFTVQLGGQYFTFVMDPLSFGPILKDAKRKLDFVEYAEKLVLKVFGYRSMQGDHRMIHSASTKHLMGDGLEELNKAMLDNLSLVMLGPKGPSPDASCWREDGLFHFCYDILFKAGYLSLFGRTEDKEQDLLQAEELFMQFRKFDRMFPRFVYSLLGPREWLEVGRLQCLFHKMLSVEHSLERHGISSWITDMLQVLREQGVAPAMQDKFNFMMLWASQGNTGPTTFWALLFLLKHPEAMRAVREEATRVLGEARLEDKQSFDVEVSALNHMPVLDSVMEETLRLGAAPTLLRVVNSDQILKMASGQEYRLRHGDILALFPYLSVHMDPDIHPEPTTFKYDRFLTPSGSRKVNFYKAGKKIHHYTMPWGSGISICPGRFFALTEMKLFVLLMVTHFDLELVDPDTPVPPVDPQRWGFGTMQPSYEVRFRYRLRPTE

SEQ ID NO: 272 - DNA, 1506 bp, Sus scrofa
atggttttgtggggtccagttttaggtgttttgttagttgctatcgttggttatttgtgtttgcaaggtttgttgagacaaagaagaccagaagaaccaccattggataaaggttctgttccatggttaggtcatgctatgacttttagaaagaatatgttggaattcttgaaacatatgtgggcaagacatggtgacatttttactgttcaattgggtggtcaatactttacatttgttatggacccattgtcttttggtccaatcttgaaggatgctaagagaaagttggattttgttgaatatgcagaaaaattggttttaaaagtttttggttacagatcaatgcaaggtgaccatagaatgatccattctgcttcaacaaagcatttgatgggtgacggtttggaagaattgaataaggcaatgttggataatttgtcattagttatgttgggtccaaaaggtccatctccagatgcttcatgttggagagaagatggtttgttccatttctgttacgatatcttgtttaaagcaggttacttgtctttgttcggtagaactgaagataaggaacaagatttgttgcaagctgaagaattgtttatgcaattcagaaagttcgatagaatgttcccaagattcgtttactcattgttgggtccaagagaatggttggaagttggtagattgcaatgtttgttccataagatgttgtctgttgaacattcattggaaagacatggtatctcttcatggatcactgatatgttgcaagttttgagagaacaaggtgttgctccagcaatgcaggataagtttaatttcatgatgttgtgggcttctcaaggtaatacaggtccaactacattctgggcattgttatttttgttgaagcatccagaagctatgagagcagttagagaagaagctactagagttttgggtgaagcaagattggaagataagcaatctttcgatgttgaagtttcagctttgaatcatatgccagttttggattctgttatggaagaaactttgagattaggtgctgcaccaacattgttaagagttgttaactctgatcaaatcttgaagatggcttcaggtcaagaatacagattgagacatggtgacatcttggcattatttccatacttgtcagttcatatggacccagatatccatccagaaccaactacttttaaatacgatagatttttaacaccatctggttcaagaaaggttaacttctacaaggcaggtaaaaagattcatcattacactatgccatggggttctggtatttcaatttgtccaggtagatttttcgctttgactgaaatgaagttgttcgttttgttgatggttacacatttcgatttggaattagttgatccagatactccagttccaccagttgatccacaaagatggggttttggtacaatgcaaccatcttacgaagttagattcagatacagattgagaccaactgaataa

SEQ ID NO: 273 - protein, 499 aa, Rattus norvegicus
MLWGSVLGALLMAVGCLCLSLLPRHRRPWEPPLDKGFVPWLGHTMAFRKNMFEFLKGMRAKHGDVFTLQLGGQYFTFVMDPLSFGPIIKSTQKVLDFVTYARELVFKVFGYQSMDEDHQMLHVASTKHLMGQGLEDLNRAMLDSLSLVMLGPKGRSLGARSWCEDGLFHFCYSILFKAGFLSLFGCTKDKEQDLDEADELFRKFRRFDLLFPRFVYSLLGPLEWVEVSQLQRLFHQRLSVEQNLEKDGISNWLGFMLRFLRERGMASSMQDKFNFMMLWASQGNTGPTCFWALLFLLKHQDAMKAVREEATRVLGEARLEAETSFAFTLSALKCTPVLDSVMEETLRLCATPTLLGVVQEDYVLKMASGQEYQIRRGDKVALFPYLSVHMDPDIHPEPTTFKYNRFLNPDGTRKVDFYKSGKKIHHYNMPWGSGVSICPGRFFAPSEMKTFVLLMVMYFDFELVDPDMPVPPIDPRRWGFGTSQPSHEVRFRYRLKPMQ

SEQ ID NO: 274 - DNA, 1500 bp, Rattus norvegicus
atgttgtggggttctgttttaggtgctttgttaatggcagttggttgtttgtgtttatcattgttaccaagacatagaagaccatgggaaccaccattggataaaggttttgttccatggttaggtcatactatggcttttagaaagaatatgttcgaattcttgaagggtatgagagcaaagcatggtgacgtttttactttgcaattaggtggtcaatacttcacattcgttatggacccattgtctttcggtccaattattaagtcaactcaaaaggttttggatttcgttacatacgcaagagaattagtttttaaagtttttggttaccaatctatggatgaagatcatcaaatgttgcatgttgcttcaactaaacatttgatgggtcaaggtttggaagatttgaatagagcaatgttggattctttgtcattagttatgttgggtccaaaaggtagatctttaggtgctagatcatggtgtgaagatggtttgttccatttctgttactctatcttgtttaaagcaggtttcttgtcattgttcggttgtacaaaggataaggaacaagatttggatgaagctgatgaattgtttagaaagtttagaagattcgatttgttatttccaagatttgtttactctttgttaggtccattagaatgggttgaagtttcacaattgcaaagattgttccatcaaagattgtctgttgaacaaaatttggaaaaggatggtatctcaaactggttgggttttatgttgagatttttaagagaacgtggtatggcttcttcaatgcaggataagtttaatttcatgatgttgtgggcttctcaaggtaatactggtccaacatgtttctgggcattgttatttttgttgaagcatcaagatgctatgaaagcagttagagaagaagcaactagagttttgggtgaagctagattagaagcagaaacttctttcgcttttacattgtcagcattgaaatgtactccagttttggattctgttatggaagaaacattgagattgtgtgctactccaacattgttaggtgttgttcaagaagattacgttttgaagatggcttctggtcaagaataccaaattagaagaggtgacaaagttgcattgtttccatatttgtcagttcatatggacccagatatccatccagaaccaactacttttaaatacaacagatttttgaatccagatggtacaagaaaggttgatttctacaagtctggtaaaaagattcatcattacaacatgccatggggttctggtgtttcaatttgtccaggtagatttttcgctccatcagaaatgaagactttcgttttgttgatggttatgtacttcgatttcgaattggttgatccagatatgccagttccaccaattgatccaagaagatggggttttggtacatctcaaccatcacatgaagttagattcagatacagattgaagccaatgcaataa

SEQ ID NO: 275 - protein, 496 aa, Homo sapiens
MVLWGPVLGALLVVIAGYLCLPGMLRQRRPWEPPLDKGTVPWLGHAMAFRKNMFEFLKRMRTKHGDVFTVQLGGQYFTFVMDPLSFGSILKDTQRKLDFGQYAKKLVLKVFGYRSVQGDHEMIHSASTKHLRGDGLKDLNETMLDSLSFVMLTSKGWSLDASCWHEDSLFRFCYYILFTAGYLSLFGYTKDKEQDLLQAGELFMEFRKFDLLFPRFVYSLLWPREWLEVGRLQRLFHKMLSVSHSQEKEGISNWLGNMLQFLREQGVPSAMQDKFNFMMLWASQGNTGPTSFWALLYLLKHPEAIRAVREEATQVLGEARLETKQSFAFKLGALQHTPVLDSVVEETLRLRAAPTLLRLVHEDYTLKMSSGQEYLFRHGDILALFPYLSVHMDPDIHPEPTVFKYDRFLNPNGSRKVDFFKTGKKIHHYTMPWGSGVSICPGRFFALSEADFERNVDSGPQLTQSIYDTMISWLMELFSAAETEPLLREPWSPPTL

SEQ ID NO: 276 - DNA, 1491 bp, Homo sapiens
atggttttgtggggtccagttttaggtgctttgttagttgttattgcaggttatttgtgtttgccaggcatgttgagacaaagaagaccatgggaaccaccattggataaaggtactgttccatggttaggtcatgctatggcttttagaaagaatatgttcgaattcttgaaaagaatgagaactaaacatggtgacgtttttacagttcaattaggtggtcaatacttcactttcgttatggacccattgtcatttggttctatcttgaaggatacacaaagaaagttggatttcggtcaatacgctaagaaattggttttgaaggttttcggttacagatctgttcaaggtgaccatgaaatgatccattctgcttcaacaaagcatttgagaggtgacggtttgaaggatttgaacgaaactatgttggattctttgtcattcgttatgttgacatcaaaaggttggtctttagatgcatcatgttggcatgaagattctttgtttagattctgttactacatcttgtttactgctggttatttgtcattgttcggttacacaaaggataaggaacaagatttgttacaagctggtgaattgtttatggaattcagaaagttcgatttgttatttccaagatttgtttattctttgttatggccaagagaatggttggaagttggtagattgcaaagattgttccataagatgttgtctgtttcacattctcaagaaaaggaaggtatctctaactggttgggtaacatgttgcaattcttgagagaacaaggtgttccatcagctatgcaggataagtttaatttcatgatgttgtgggcatctcaaggtaatactggtccaacatcattctgggctttgttgtacttgttgaagcatccagaagctatcagagcagttagagaagaagctactcaagttttgggtgaagcaagattggaaacaaagcaatctttcgcttttaaattgggtgcattacaacatactccagttttggattcagttgttgaagaaactttgagattgagagctgcaccaacattgttaagattggttcatgaagattacacattgaagatgtcttcaggtcaagaatacttgtttagacatggtgacatcttggctttgttcccatatttgtctgttcatatggacccagatatccatccagaaccaactgtttttaaatacgatagatttttaaacccaaacggttcaagaaaggttgatttctttaagactggtaaaaagattcatcattacacaatgccatggggttcaggtgtttctatttgtccaggtagatttttcgctttgtctgaagcagattttgaaagaaatgttgattctggtccacaattgactcaatcaatctatgatacaatgatctcttggttgatggaattattttcagctgcagaaactgaaccattgttaagagaaccatggtcaccaccaacattgtaa

SEQ ID NO: 277 - protein, 510 aa, Danio rerio
MALVQILLALLISVIGALYLLGSFRRRRTGEPPLEKGPIPWLGHVLEFRKDTAKFLNRMKAKHGDIFTVQLGGFYFTFITDPLSFGAVVKEARAKLDFTKFAEQLVQRVFGYHSIQSEHKVLQASSTKHLMGDGLVVMTQAMMYNLQNLMLHSVGSGNGKVWQESGLFAYSYNIVFRAGYLSLFGNESPKGTGKESVEKAKEIDRQESNDLFWEFRKYDQLFPNLAYGVLGPSEKMEAERLKRLFWSTLSVQKMRARDNISGWVSDQQQVRAEHGMQEFMQDRYMFLLLWASQGNTGPSAFWLLLYLMKHPEAMSAVRKEVEEILKEAGQEVKPGGPLIDLSRDMLLKTPILDSAVEETLRLTAAPILTRAVMQDMTIIMANGQEYKIREGDRVAVFPYVVHVDPEVHPDPLTFKYDRFLNADGSRKTDFYKGGKKLKYYSMPWGAGTTMCPGRFFATNELKQFVFLMLSYFDFELTNPNEQIPGIDIRRWGFGSMQSDRDIQFRYRPRI

SEQ ID NO: 278 - DNA, 1533 bp, Danio rerio
atggctttggttcaaatcttgttggcattgttgatctctgttattggtgctttgtatttgttgggttcttttagaagaagaagaactggtgaaccaccattagaaaaaggtccaattccatggttgggtcatgttttagaattcagaaaggatactgctaagttcttgaacagaatgaaagcaaagcatggtgacatttttacagttcaattgggtggtttctacttcacttttattacagatccattatcttttggtgctgttgttaaggaagctagagcaaagttggatttcacaaagttcgcagaacaattagttcaaagagttttcggttaccattctatccaatcagaacataaggttttgcaagcttcttcaactaagcatttgatgggtgacggtttagttgttatgacacaagcaatgatgtacaatttgcaaaatttgatgttacattctgttggttcaggcaatggtaaagtttggcaagaatctggtttgttcgcttactcatacaacatcgtttttagagcaggttatttgtctttgttcggtaacgaatcaccaaaaggtactggtaaagaatctgttgaaaaggctaaggaaatcgatagacaagaatcaaacgatttgttttgggaattcagaaagtacgatcaattgttcccaaatttggcttacggtgttttaggtccatctgaaaagatggaagcagaaagattgaagagattattttggtctactttgtcagttcaaaagatgagagctagagataacatctctggttgggtttcagatcaacaacaagttagagcagaacatggtatgcaagaattcatgcaagatagatacatgttcttgttgttgtgggcttctcaaggtaatacaggtccatcagcattctggttgttgttgtacttgatgaagcatccagaagctatgtcagcagttagaaaggaagttgaagaaatcttgaaggaagctggtcaagaagttaaaccaggtggtccattgatcgatttgtctagagatatgttgttgaagacaccaatcttggattcagcagttgaagaaactttgagattaacagctgcaccaatcttgactagagctgttatgcaagatatgacaatcatcatggcaaacggtcaagaatacaagatcagagaaggtgacagagttgctgtttttccatacgttgttcatgttgatccagaagttcatccagatccattgacttttaaatacgatagatttttaaacgctgatggttctagaaagacagatttctacaaaggtggtaaaaagttgaagtactactcaatgccatggggtgctggtactacaatgtgtccaggtagatttttcgcaactaatgaattgaaacaatttgttttcttgatgttgtcttacttcgatttcgaattgacaaacccaaacgaacaaatcccaggtatcgatatcagaagatggggttttggttctatgcaatcagatagagatatccaattcagatacagaccaagaatttga
